(19) United States
(12) Patent Application Publication
(10) Pub. No.: US 2009/0098074 A1
(43) Pub. Date: Apr. 16, 2009

(54) Keratin-Binding Effector Molecules Containing Reactive Dyes

(75) Inventors: Heiko Barg, Speyer (DE); Burghard Liebmann, Bensheim (DE); Martin Volkert, Ludwigshafen (DE); Arne Ptock, Ludwigshafen (DE); Laszlo Somogyi, Limburgerhof (DE); Heike Reents, Speyer (DE)

Correspondence Address: CONNOLLY BOVE LODGE & HUTZ, LLP, P O BOX 2207, WILMINGTON, DE, 19899, US

(73) Assignee: BASF SE, Ludwigshafen (DE)

(21) Appl. No.: 12/095,153

(22) PCT Filed: Nov. 23, 2006
(86) PCT No.: PCT/EP06/68823

§ 371 Date: May 28, 2008

(30) Foreign Application Priority Data
Dec. 1, 2005 (EP) 05111581.4
Jun. 30, 2006 (EP) 06116402.6

(51) Int. Cl. A61K 8/64; C07K 14/435; A61Q 1/02; A61Q 5/00

(52) U.S. Cl. 424/63; 530/350; 8/428

(57) ABSTRACT

The invention relates to keratin-binding effector molecules comprising reactive dyes and keratin-binding polypeptides and to their use in hair-dyeing preparations. The present invention further relates to a method of dyeing hair.

[0001] The invention relates to keratin-binding effector molecules comprising reactive dyes and keratin-binding polypeptides, and to their use in hair-coloring preparations and to the hair-coloring preparations themselves. The present invention further relates to a method of coloring hair.

### PRIOR ART

[0002] Compositions for coloring hair (hair colorants) are divided into three classes depending on their color resistance: temporary hair colorants which last only 1-2 hair washes, semipermanent hair colorants which have to be renewed after 8-10 hair washes, and permanent hair colorants which cannot be washed out.

[0003] Temporary and semipermanent hair colorants are referred to as nonoxidative. Here, the dyes position themselves on the keratin in the hair or penetrate into the hair fiber. With permanent hair colorants, the most widespread hair colorants by far, the colors are formed directly on or in the hair from colorless precursors as a result of a chemical reaction in the presence of hydrogen peroxide, which serves as oxidizing agent. Here, the hair is completely colored through, the color cannot be washed out. These hair colorants are referred to as oxidative hair colorants.

[0004] Permanent hair coloring is very resistant to hair washing, the effect of light and other hair-treatment methods. It is the most widespread and has a market share of about 80% among the hair colorants. It only needs to be topped up about every month due to hair growth. With this coloring system, the dyes are formed directly on and in the hair, as a result of chemical reactions to which the uncolored intermediates or precursors are subjected. Oxidation reactions and coupling processes and condensations occur here which are brought about by hydrogen peroxide in the presence of ammonia or monoethanolamine. The use of hydrogen peroxide as oxidizing agent is therefore required because it not only initiates the dye formation, but at the same time also destroys the melanin pigments in the hair and in so doing brings about bleaching for which reason this coloring procedure is also referred to as a lightening coloration. The permanent hair colorants in principle also include the so-called self-oxidizing dyes, which are oxidized even by atmospheric oxygen.

[0005] Hair colorants are usually in the form of aqueous—preferably thickened—solutions or emulsions and, besides dyes, comprise, for example, fatty alcohols and/or other oil components, emulsifiers and surfactants, and if appropriate alcohols.

[0006] Oxidation hair colorants generally consist of two components, namely

(A) the dye carrier mass comprising the dyes and
(B) the oxidizing agent preparation.

[0007] These components are mixed shortly prior to application and then applied to the fibers to be dyed. Customary application forms of such permanent or oxidation hair colorants are cream hair colors and hair-coloring gels.

[0008] According to studies, 35 percent of women and ten percent of men in industrialized countries regularly color their hair. However, chemical hair colors have been in dispute for a prolonged period since health risks are not ruled out.

[0009] Thus, with each hair coloring, hair damage also takes place at the same time. The coloring pigments have to be incorporated through the predective squamous layer into the cortical layer of the hair.

[0010] As already explained above, hair colors comprise two components: an oxidizing agent and a coloring cream. The aromatic amines present in the hair colors have come in for criticism, particularly recently. During the coloring, these are thought to pass into the body via the head and are broken down in the liver. In the bladder, the degradation products are then sometimes converted to carcinogenic substances.

[0011] A recent study by Dartmouth Medical School in the “International Journal of Cancer” (A. Andres: Int J Cancer 2004; 109: 581-586) sees a possible connection between hair colorations and bladder cancer: women who regularly use permanent hair colorants had, on average, a 1.5 to 2.3-fold increased risk of suffering from urinary bladder cancer than women who did not color their hair.

[0012] Permanent hair colors, which have not been tested with regard to their acceptability, are to be banned in the future in the EU. At the moment, that would affect half of all hair colorants.

[0013] An object of this invention was to provide new types of dermocosmetic active ingredient compounds for application to skin or hair, specifically for coloring skin, hair or nails, and methods of producing same. Advantageously, active ingredient compounds were to be identified which have a keratin-binding property and are additionally suitable for producing cosmetic compositions and/or hair colorants. In addition, it was an object of the present invention to identify suitable compounds which can be coupled to a polypeptide with keratin-binding properties via a covalent bond. In particular, it was an object of the present invention to provide an innovative method for coloring hair, preferably a reversible coloring, in which the hair is damaged as little as possible.

[0014] Surprisingly, these objects could be achieved as described below by coupling chemical dyes to keratin-binding polypeptides.

### SUMMARY OF THE INVENTION

[0015] In a first embodiment, the invention relates to keratin-binding effector molecules comprising (a) at least one reactive dye (i) and (b) at least one keratin-binding polypeptide (ii).

[0016] In a preferred embodiment, the specified keratin-binding effector molecules comprise at least one keratin-binding polypeptide (ii) which has a binding affinity to human skin keratin, hair keratin or nail keratin.

[0017] Preferably, the keratin-binding polypeptide (ii) specified under (b) comprises
[0018] (a) at least one polypeptide with one of the sequences shown in SEQ ID No.: 2, 4, 6, 8, 10, 12, 14, 16, 18, 20, 22, 24, 26, 28, 30, 32, 34, 36, 38, 40, 42, 44, 46, 48, 50, 52, 54, 56, 58, 60, 62, 64, 66, 68, 70, 72, 74, 76, 78, 80, 82, 84, 86, 88, 90, 92, 94, 96, 98, 100, 102, 104, 106, 108, 110, 112, 114, 116, 118, 120, 122, 124, 126, 128, 130, 132, 134, 136, 138, 140, 146, 150, 153, 156, 157, 158, 160, 162, 164, 166, 168 or 170, or
[0019] (b) a polypeptide which is at least 40% identical to at least one of the sequences according to SEQ ID No.: 2, 4, 6, 8, 10, 12, 14, 16, 18, 20, 22, 24, 26, 28, 30, 32, 34, 36, 38, 40, 42, 44, 46, 48, 50, 52, 54, 56, 58, 60, 62, 64, 66, 68, 70, 72, 74, 76, 78, 80, 82, 84, 86, 88, 90, 92, 94, 96, 98, 100, 102, 104, 106, 108, 110, 112, 114, 116, 118, 120, 122, 124, 126, 128, 130, 132, 134, 136, 138, 140, 146, 150, 153, 156, 157, 158, 160, 162, 164, 166, 168 or 170 and is able to bind keratin.

[0020] Preferably, the keratin-binding polypeptide (ii) used according to the invention is encoded by a nucleic acid molecule comprising at least one nucleic acid molecule chosen from the group consisting of:
[0021] a) nucleic acid molecule which encodes a polypeptide comprising the sequence shown in SEQ ID No.: 2, 4, 6, 8, 10, 12, 14, 16, 18, 20, 22, 24, 26, 28, 30, 32, 34, 36, 38, 40, 42, 44, 46, 48, 50, 52, 54, 56, 58, 60, 62, 64, 66, 68, 70, 72, 74, 76, 78, 80, 82, 84, 86, 88, 90, 92, 94, 96, 98, 100, 102, 104, 106, 108, 110, 112, 114, 116, 118, 120, 122, 124, 126, 128, 130, 132, 134, 136, 138, 140, 146, 150, 153, 156, 157, 158, 160, 162, 164, 166, 168 or 170;
[0022] b) b) nucleic acid molecule which comprises at least one polynucleotide of the sequence shown in SEQ ID No.: 1, 3, 5, 7, 9, 11, 13, 15, 17, 19, 21, 23, 25, 27, 29, 31, 33, 35, 37, 39, 41, 43, 45, 47, 49, 51, 53, 55, 57, 59, 61, 63, 65, 67, 69, 71, 73, 75, 77, 79, 81, 83, 85, 87, 89, 91, 93, 95, 97, 99, 101, 103, 105, 107, 109, 111, 113, 115, 117, 119, 121, 123, 125, 127, 129, 131, 133, 135, 137, 139, 145, 149, 152, 159, 161, 163, 165, 167 or 169;
[0023] c) nucleic acid molecule which encodes a polypeptide according to the sequences SEQ ID No.: 2, 4, 6, 8, 10, 12, 14, 16, 18, 20, 22, 24, 26, 28, 30, 32, 34, 36, 38, 40, 42, 44, 46, 48, 50, 52, 54, 56, 58, 60, 62, 64, 66, 68, 70, 72, 74, 76, 78, 80, 82, 84, 86, 88, 90, 92, 94, 96, 98, 100, 102, 104, 106, 108, 110, 112, 114, 116, 118, 120, 122, 124, 126, 128, 130, 132, 134, 136, 138, 140, 146, 150, 153, 156, 157, 158, 160, 162, 164, 166, 168 or 170;
[0024] d) nucleic acid molecule with a nucleic acid sequence corresponding to at least one of the sequences according to SEQ ID No.: 1, 3, 5, 7, 9, 11, 13, 15, 17, 19, 21, 23, 25, 27, 20, 31, 33, 35, 37, 30, 41, 43, 45, 47, 49, 51, 53, 55, 57, 59, 61, 63, 65, 67, 69, 71, 73, 75, 77, 79, 81, 83, 85, 87, 89, 91, 93, 95, 97, 99, 101, 103, 105, 107, 109, 111, 113, 115, 117, 119, 121, 123, 125, 127, 129, 131, 133, 135, 137, 139, 145, 149, 152, 159, 161, 163, 165, 167 or 169 or a nucleic acid molecule derived therefrom by substitution, deletion or insertion which encodes a polypeptide which is at least 40% identical to at least one of the sequences according to SEQ ID No.: 2, 4, 6, 8, 10, 12, 14, 16, 18, 20, 22, 24, 26, 28, 30, 32, 34, 36, 38, 40, 42, 44, 46, 48, 50, 52, 54, 56, 58, 60, 62, 64, 66, 68, 70, 72, 74, 76, 78, 80, 82, 84, 86, 88, 90, 92, 94, 96, 98, 100, 102, 104, 106, 108, 110, 112, 114, 116, 118, 120, 122, 124, 126, 128, 130, 132, 134, 136, 138, 140, 146, 150, 153, 156, 157, 158, 160, 162, 164, 166, 168 or 170 and is able to bind to keratin;
[0025] e) nucleic acid molecule which encodes a polypeptide which is recognized by a monoclonal antibody directed toward a polypeptide which is encoded by the nucleic acid molecules as in (a) to (c);
[0026] f) nucleic acid molecule coding for a keratin-binding Protein which hybridizes under stringent conditions with a nucleic acid molecule as in (a) to (c);
[0027] g) nucleic acid molecule coding for a keratin-binding Protein which can be isolated from a DNA bank using a nucleic acid molecule as in (a) to (c) or part fragments thereof comprising at least 15 nt (nucleotides), preferably 20 nt, 30 nt, 50 nt, 100 nt, 200 nt or 500 nt, as probe under stringent hybridization conditions.
[0028] h) nucleic acid molecule which can be produced by backtranslation of one of the amino acid sequences shown in the sequences SEQ ID No.: 2, 4, 6, 8, 10, 12, 14, 16, 18, 20, 22, 24, 26, 28, 30, 32, 34, 36, 38, 40, 42, 44, 46, 48, 50, 52, 54, 56, 58, 60, 62, 64, 66, 68, 70, 72, 74, 76, 78, 80, 82, 84, 86, 88, 90, 92, 94, 96, 98, 100, 102, 104, 106, 108, 110, 112, 114, 116, 118, 120, 122, 124, 126, 128, 130, 132, 134, 136, 138, 140, 146, 150, 153, 156, 157, 158, 160, 162, 164, 166, 168 or 170.

[0029] In a further preferred embodiment of the present invention, the specified keratin-binding effector molecules comprise at least one reactive dye (ii), which has at least one reactive anchor, chosen from the group consisting of

(a) a group of the formula 1 activatable under alkaline conditions

[chemical structure]

[0030] in which
[0031] [symbol] means the bond to the dye molecule (D),
[0032] X is an electron-withdrawing radical or is an alkyl, —O-alkyl, cyano, hydroxy, halogen radical or H,
[0033] k is 1, 2 or 3,
[0034] n is 0 or 1 and
[0035] B is a group —CH═CH₂ or a group —CH₂—CH₂-Q or —NH—CH₂—CH₂-Q or —NH—CH═CH₂, in which Q is a group which can be cleaved off under alkaline conditions, and
   (b) an acrylamido anchor of formula 2,

[chemical structure]

[0036] in which
[0037] [symbol] means the bond to the dye molecule (D), and
   (c) one of the compounds according to formulae 3, 4 or 5,

[chemical structure]

in which [symbol]
means the bond to the dye molecule (D),
V is fluorine or chlorine:
U₁, U₂, independently of one another, are fluoro, chloro or hydrogen; and
Q₁, Q₂, independently of one another, are chloro, fluoro, cyanamide, hydroxy, (C₁-C₆)-alkoxy, phenoxy, sulfophenoxy, mercapto, (C₁-C₆)-alkylmercapto, pyridino, carboxypyridino, carbamoylpyridino, or a group of the general formula (6) or (7),

[chemical structure]

in which R² is hydrogen or (C₁-C₆)-alkyl, sulfo-(C₁-C₆)-alkyl, or phenyl, which is unsubstituted or substituted by (C₁-C₄)-alkyl, (C₁-C₄)-alkoxy, sulfo, halogen, carboxy, acetamido, ureido; R³ and R⁴, independently of one another, have one of the meanings of R², or are a group of the general formula (8),

[chemical structure]

or form a cyclic ring system of the formula —(CH₂)ⱼ—, where j is 4 or 5, or alternatively —(CH₂)₂-E-(CH₂)₂—, where E is oxygen, sulfur, sulfo, —NR⁵— where R^{5′}=(C₁-C₆)-alkyl;
W is phenylene which is unsubstituted or substituted by one or two substituents, such as (C₁-C₄)-alkyl, (C₁-C₄)-alkoxy, carboxy, sulfo, chloro, bromo, or is (C₁-C₄)-alkylene-arylene or (C₂-C₆)-alkylene, which may be interrupted by oxygen, sulfur, sulfo, amino, carbonyl, carbonamido, or is phenylene-CONH-phenylene which is unsubstituted or substituted by (C₁-C₄)-alkyl, (C₁-C₄)-alkoxy, hydroxy, sulfo, carboxy, amido, ureido or halogen, or is naphthylene which is unsubstituted or substituted by one or two sulfo groups; and
Z is a group —CH═CH₂ or a group —CH₂—CH₂-Q or —NH—CH₂—CH₂-Q or —NH—CH═CH₂, in which Q is a group which can be cleaved off under alkaline conditions;
R²⁴, R²⁵ and R²⁶ are (C₁-C₄)-alkyl or (C₁-C₄)-hydroxyalkyl;
B— is the equivalent of an anion, such as hydrogensulfate, sulfate, fluoride, chloride, bromide, dihydrogenphosphate, hydrogenphosphate, phosphate, hydroxide or acetate.

[0038] In a moreover preferred embodiment of the present invention, the keratin-binding effector molecule comprises a reactive dye comprising a reactive anchor according to formula 1, where at least one of the radicals present therein is a group SO₃H.

[0039] Furthermore, the invention preferably relates to keratin-binding effector molecules which comprise a reactive dye which comprises a reactive anchor according to formula 1 and in which B in formula 1 is CH═CH₂, a group CH₂—CH₂—O—SO₃H or is CH₂—CH₂CL.

[0040] According to the invention, preference is given to the keratin-binding effector molecules described above in which the group of formula I which is activatable under alkaline conditions is bonded to the dye molecule (D) via a group —NH—, —N═N—, —NH—C(O)—, —NH—SO₂— or —N(R)—, where R is alkyl. In a particularly preferred embodiment, they are keratin-binding effector molecules which comprise dyes chosen from the group of dyes of the phthalocyanine series, anthraquinone dyes, azo dyes, formazane dyes, dioxazine dyes, actidine dyes, xanthene dyes, polymethine dyes, stilbene dyes, sulfur dyes, triarylmethane dyes, benzopyran dyes, dibenzanthrone dyes and the metal complexes of these dyes.

[0041] According to the invention, preference is also given to keratin-binding effector molecules comprising at least one reactive dye which comprises a reactive anchor chosen from the following radicals (1-1) to (1-43).

[chemical structure]

[chemical structure]

[chemical structure]

[chemical structure]

[chemical structure]

[0042] The present invention also preferably provides keratin-binding effector molecules in which the reactive dye (i) is coupled to the keratin-binding polypeptide (ii) indirectly via a linker molecule.

[0043] In the case of keratin-binding effector molecules preferred according to the invention, the dye or the reactive dye is coupled to the keratin-binding polypeptide via a linker molecule (iii) according to formula 9 or 10,

[chemical structure]

where “n” is an integer between 0 and 40.

[0044] The present invention further provides the use of the keratin-binding effector molecules described above in skin colorants, hair colorants or decorative cosmetics.

[0045] In addition, the present invention relates to skin colorants, nail colorants and/or hair colorants, preferably hair colorants, comprising at least one of the keratin-binding effector molecules according to the invention described above.

[0046] This invention further provides a method of coloring hair, skin or nails using keratin-binding effector molecules comprising (a) at least one keratin-binding polypeptide (ii) and (b) a dye or reactive dye (i).

[0047] In a particularly preferred embodiment of the method according to the invention, the above defined keratin-binding effector molecules according to the invention are used.

[0048] In a particularly preferred embodiment of the abovementioned method for coloring hair, skin or nails, it is a reversible method in which the keratin-binding effector molecule is displaced from the hair keratin, skin keratin or nail keratin in a displacement reaction by treatment with (i) a keratin-binding polypeptide or (ii) a keratin-containing solution, or the keratin-binding effector molecule is removed from skin, hair or nails by a solution with a high detergent content (e.g. SDS).

### DEFINITIONS

[0049] In connection with the description, “amino function-bearing effector molecule”, “amino functions” means amino groups which allow said amino function-bearing molecules to covalently link to other molecules via an amide bond. For the purposes of the present invention, “amino functions” are also those which can be converted chemically into amino functions. Here, the effector molecules according to the invention have at least one amino function. However, it is also possible to use effector molecules with two, three or more amino functions and/or secondary amino groups.

[0050] For the purposes of the present invention, “antibodies” are Proteins which humans and jaw-bearing vertebrates produce to predect against antigens (infection pathogens or biological material alien to the body). They are a central constituent of the immune system of higher eukaryotes and are secreted by a class of white blood corpuscles, the B cells. They occur in blood and in the extracellular liquid of tissue.

[0051] “Decorative cosmetics” means cosmetic auxiliaries which are not primarily used for the care, but for beautifying or improving the appearance of skin, hair and/or fingernails and toenails. Auxiliaries of this type are appropriately known to the person skilled in the art and comprise, for example, kohl pencils, mascara, eye shadows, tinted day creams, powders, concealing sticks, blusher, lipsticks, lipliner sticks, make-up, nail varnish, glamour gel etc. For the purposes of the present invention, they are particularly compositions suitable for coloring skin, nails and/or hair.

[0052] “Hair colorants” are compositions or preparations (i) coloring hair. For the purposes of the present invention, “hair colorants” are divided into direct colors and true hair colors. In the case of direct colors, one or more hair washes suffice to remove the color again (tints). The dye is only positioned on the surface of the hair substance, no chemical reaction takes place. For the hair itself, the process is without risk. The true (permanent) hair colors use oxidation coloring (see also “Prior art”). Hair colorants comprise, in a cosmetically compatible medium, suitable auxiliaries and additives which are familiar to the person skilled in the art and can be found in cosmetics handbooks, for example, Schrader, Grundlagen und Rezepturen der Kosmetika [Fundamentals and formulations of cosmetics], Hüthig Verlag, Heidelberg, 1989, ISBN 3-7785-1491-1, or Umbach, Kosmetik: Entwicklung, Herstellung und Anwendung kosmetischer Mittel [Cosmetics: development, manufacture and use of cosmetic compositions], 2nd extended edition, 1995, Georg Thieme Verlag, ISBN 3 13 712602 9.

[0053] For the purposes of the present invention, “effector molecule” means molecules which have a certain foreseeable effect, preferably a color-changing and/or care effect or a cosmetically decorative effect on skin, hair or nails. Preferably, the effector molecules are dyes as depicted, for example, in Tables 3, 5 and 6

[0054] For the purposes of the present invention, “keratin” means intermediate filaments constructed from rope-like Protein complexes. Intermediate filaments are constructed from many Proteins or the same type (monomers) which position themselves in parallel to give a tube-like structure. Intermediate filaments are bound to give relatively large bundles (tonofibrils). Intermediate filaments form the cytoskeleton of the cell with the micredubules and actin filaments. A distinction is made between five types of intermediate filaments: acidic and basic keratins, desmins, neurofilaments and lamins. Of specific preference for the purposes of the present invention are the acidic and basic keratins occurring in the epithelia (single or multiple cell layers which cover all external body surfaces of multicellular animal organisms). “Keratin” or “keratins” (also: horny substance, scleroProtein) means a Protein which is responsible for the stability and shape of the cells. This Protein is a constituent of mammal skin, hair and nails. The strength of keratin is increased through fiber formation: the individual amino acid chains form a right-handed alpha-helix, and every three of these helixes form a left-hand superhelix (=predofibrils). Eleven predofibrils combine to give a microfibril these combine in turn to give bundles and form macrofibrils which, for example, surround the cells of the hair.

[0055] “Keratin-binding polypeptide” means a polypeptide or a Protein which has the property of binding to keratin. Keratin-binding polypeptides are thus also intermediate filament-associated Proteins. These keratin-binding polypeptides have a binding affinity toward the keratin or the macrostructures consisting of keratin such as predofibrils, microfibrils or macrofibrils. In addition, keratin-binding polypeptides are understood as meaning those polypeptides which have a binding affinity to skin, hair and/or fingernails or toenails of mammals.

[0056] “Keratin-binding polypeptides” are also polypeptides which, within a mammal organism, have a biological function associated with the binding of keratin, keratin fibers, skin or hair. Keratin-binding polypeptides likewise means the binding motifs or Protein domains necessary for the actual binding to the keratin, the keratin fibers, skin, hair or nails. The binding of the keratin-binding polypeptide (ii) to keratin can be tested under the conditions described in Example 8, 9 and 10. Keratin-binding polypeptides are those polypeptides which, in the abovementioned quantitative keratin-binding tests, have about 10%, 20%, 30%, 40% or 50%, preferably 50%, 60%, 70%, 80% or 90%, particularly preferably 100%, 125%, 150%, very particularly preferably 200%, 300% or 400%, most preferably 500%, 600%, 700% or 1000% or more of the keratin-binding capacity of desmoplakin (SEQ ID No.: 2), preferably of the keratin-binding domain B of desmoplakin (SEQ ID No.: 4).

[0057] “Coupling” in connection with the binding of a linker molecule to an effector molecule or keratin-binding Protein means a covalent linking of said molecules.

[0058] “Cosmetically compatible medium” is to be understood in the wide sense and means substances suitable for the production of cosmetic or dermocosmetic preparations, and mixtures thereof. They are preferably Protein compatible media.

[0059] Upon contact with human and/or animal skin tissue or hair, “cosmetically compatible substances” lead to no irritations or damage and have no incompatibilities with other substances. In addition, these substances have a slight allergenic potential and are approved by state registration authorities for use in cosmetic preparations. These substances are familiar to the person skilled in the art and can be found, for example, in cosmetics handbooks, for example Schrader, Grundlagen und Rezepturen der Kosmetika [Fundamentals and formulations of cosmetics], Hüthig Verlag, Heidelberg, 1989, ISBN 3-7785-1491-1.

[0060] “Nucleic acid” or “nucleic acid molecule” means deoxyribonucleotides, ribonucleotides or polymers or hybrids thereof in single-strand or double-strand form, in sense or antisense orientation. The term nucleic acid or nucleic acid molecule can be used to describe a gene, DNA, cDNA, mRNA, oligonucleotide or polynucleotide.

[0061] “Nucleic acid sequence” means a successive and linked together sequence of deoxyribonucleotides or ribonucleotides of a nucleic acid molecule according to the definition given above, as can be ascertained using available DNA/RNA sequencing techniques, and depicted or shown in a list of abbreviations, letters or words which represent nucleotides.

[0062] For the purposes of the present invention, “polypeptide” means a macromolecule constructed from amino acid molecules in which the amino acids are linked together linearly via peptide bonds. A polypeptide can be made up of a few amino acids (about 10 to 100), but also includes Proteins. Proteins are generally constructed from at least 100 amino acids, but can also comprise several thousand amino acids. Preferably, polypeptides comprise at least 20, 30, 40 or 50, particularly preferably at least 60, 70, 80 or 90, very particularly preferably at least 100, 125, 150, 175 or 200, most preferably at least more than 200 amino acids, it being possible for the upper limit to be several thousand amino acids.

[0063] “Homology” or “identity” between two nucleic acid sequences is understood as meaning the identity of the nucleic acid sequence over the entire sequence length in question, which is calculated by comparison with the help of the program algorithm GAP (Wisconsin Package Version 10.0, University of Wisconsin, Genetics Computer Group (GCG), Madison, USA; Altschul et al. (1997) Nucleic Acids Res. 25:3389ff) with the following parameter settings:

| | |
|---|---|
| Gap Weight: 50 | Length Weight: 3 |
| Average Match: 10 | Average Mismatch: 0 |

[0064] By way of example, a sequence which has a homology of at least 80% based on nucleic acid with the sequence SEQ ID NO: 1 is understood as meaning a sequence which has a homology of at least 80% when compared with the sequence SEQ ID NO: 1 according to the shove program algorithm with the above set of parameters.

[0065] Homology between two polypeptides is understood as meaning the identity of the amino acid sequence over the entire sequence length in question, which is calculated by comparison with the help of the program algorithm GAP (Wisconsin Package Version 10.0, University of Wisconsin, Genetics Computer Group (GCG), Madison, USA) with the following parameter settings:

| | |
|---|---|
| Gap Weight: 8 | Length Weight: 2 |
| Average Match: 2.912 | Average Mismatch: −2.003 |

[0066] By way of example, a sequence which has a homology of at least 80% based on polypeptide with the sequence SEQ ID NO: 2 is understood as meaning a sequence which has a homology or at least 80% when compared with the sequence SEQ ID NO: 2 as cording to the above program algorithm with the above set of parameters.

[0067] “Hybridization conditions” is to be understood in the wide sense and means stringent or less stringent hybridization conditions depending on the application. Such hybridization conditions are described, inter alia, in Sambrook J, Fritsch E F, Maniatis T et al., in Molecular Cloning (A Laboratory Manual), 2nd edition, Cold Spring Harbor Laboratory Press, 1989, pages 9.31-9.57) or in Current Protocols in Molecular Biology, John Wiley & Sons, N.Y. (1989), 6.3.1-6.3.6. The person skilled in the art would choose hybridization conditions which would allow him to differentiate specific hybridizations from unspecific hybridizations. For example, the conditions during the washing step can be chosen from conditions with low stringency (with approximately 2×SSC at 50° C.) and those with high stringency (with approximately 0.2×SSC at 50° C., preferably at 65° C.) (20×SSC: 0.3M sodium citrate, 3M NaCl, pH 7.0). Moreover, the temperature during the washing step can be increased from low stringency conditions at room temperature, approximately 22° C., to higher stringency conditions, approximately 65° C. Both parameters, salt concentration and temperature, can be varied at the same time or individually, keeping the other parameter in each case constant. During the hybridization, it is also possible to use denaturing agents such as, for example, formamide or SDS. In the presence of 50% formamide, the hybridization is preferably carried out at 42° C. Some illustrative conditions for hybridization and washing step are given below:
[0068] 1. Hybridization conditions can be chosen, for example, from the following conditions;
   [0069] a) 4×SSC at 65° C.,
   [0070] b) 6×SSC at 45° C.,
   [0071] c) 6×SSC, 100 μg/ml of denatured, fragmented fish sperm DNA at 68° C.,
   [0072] d) 6×SSC, 0.5% SDS, 100 μg/ml of denatured, salmon sperm DNA at 68° C.,
   [0073] e) 6×SSC, 0.5% SDS, 100 μg/ml of denatured, fragmented salmon sperm DNA,
      [0074] 50% formamide at 42° C.,
   [0075] f) 50% formamide, 4×SSC at 42° C., or
   [0076] g) 50% (vol/vol) formamide, 0.1% bovine serum albumin, 0.1% Ficoll, 0.1% polyvinylpyrrolidone, 50 mM sodium phosphate buffer pH 6.5, 750 mM NaCl, 75 mM sodium citrate at 42° C., or
   [0077] h) 2× or 4×SSC at 50° C. (low stringency condition),
   [0078] i) 30 to 40% formamide, 2× or 4×SSC at 42° C. (low stringency condition).

[0079] 500 mN of sodium phosphate buffer pH 7.2, 7% SDS (g/V). 1 mM EDTA, 10 μg/ml single stranded DNA, 0.5% BSA (g/V) (Church and Gilbert, Genomic sequencing. Proc. Natl. Acad. Sci. U.S.A. 81: 1991. 1984)
[0080] 2. Washing steps can be chosen, for example, from the following conditions:
   [0081] a) 0.015 M NaCl/0.0015 M sodium citrate/0.1% SDS at 50° C.
   [0082] b) 0.1×SSC at 65° C.
   [0083] c) 0.1×SSC, 0.5% SDS at 68° C.
   [0084] d) 0.1×SSC, 0.5% SDS, 50% formamide at 42° C.
   [0085] e) 0.2×SSC, 0.1% SDS at 42° C.
   [0086] f) 2×SSC at 65° C. (low stringency condition).

[0087] In one embodiment, the stringent hybridization conditions are chosen as follows:

[0088] A hybridization buffer is chosen which comprises formamide, NaCl and PEG 6000. The presence of formamide in the hybridization buffer destabilizes double stranded nucleic acid molecules, as a result of which the hybridization temperature can be reduced to 42° C. without lowering the stringency. The use of salt in the hybridization buffer increases the renaturation rate of a duplex, or the hybridization efficiency. Although PEG increases the viscosity of the solution, which has a negative effect on renaturation rates, as a result of the presence of the polymer in the solution, the concentration of the probe in the remaining medium is increased, which increases the hybridization rate. The composition of the buffer is as follows:

TABLE 1
Hybridization buffer
Hybridization buffer

250 mM sodium phosphate buffer pH 7.2
1 mM EDTA
7% SDS (g/v)
250 mM NaCl
10 μg/ml ssDNA
5% polyethylene glycol (PEG) 6000
40% formamide

[0089] The hybridizations are carried out overnight at 42° C. The filters are washed the next morning 3× with 2×SSC+0.1% SDS for about 10 min in each case.

[0090] In connection with the description “hydroxy function-bearing effector molecule”, “hydroxy function” means free OH groups or hydroxyl groups which enable these OH group-bearing molecules to covalently link to other molecules via an esterification reaction. For the purposes of the present invention, “hydroxy functions” are also those which can be converted chemically into OH functions (for example, derivatives such as methoxy, ethoxy). Here, the effector molecules according to the invention have at least one hydroxyl group. However, it is also possible to use effector molecules with two, three or more hydroxy functions.

[0091] “Coupling functionalities” are functional groups of a linker molecule which can enter into a covalent bond with functional groups of the effector molecule or of the keratin-binding Protein. Nonlimiting examples which may be mentioned are: hydroxy groups, carboxyl groups, thio groups and amino groups. “Coupling functionalities” or “Coupling functionality” and “anchor groups” or “anchor group” are used synonymously.

[0092] For the purposes of the present invention, “reactive dye” means dyes comprising at least one reactive anchor which can be coupled to a keratin-binding polypeptide via a covalent bond.

[0093] For the purposes of the present invention, “reactive anchor” means chemically functional groups or radicals by means of which a covalent bond between a carbon atom or phosphorus atom of the reactive dye molecule and an oxygen, nitrogen or sulfur atom of a hydroxy, amino or thiol group of another molecule is realized.

[0094] A “group Q which can be cleaved off under alkaline conditions” is understood as meaning radicals which are cleaved off under alkaline conditions, i.e. at a pH of 7 or above, preferably 7.5 or above, with elimination and formation of a vinylsulfone group. Examples of such groups are halogen, e.g. chloro, bromo or iodo, also —O—SO₃H, —S—SO₃H, dialkylamino, quaternary ammonium radicals, such as tri-C₁-C₄-alkylammonium, benzyldi-C₁-C₄-alkylammonium or N-bonded pyridinium, and radicals of the formulae R³S(O)₂—, R⁴S(O)₂—O—, R⁵C(O)—O—. Here, R³, R⁴ and R⁵, independently of one another, are alkyl, haloalkyl or optionally substituted phenyl, where R⁵ can also be hydrogen. Preferably, Q is a group —O—(CO)CH₃ and in particular is —O—SO₃H.

[0095] For the purposes of the present invention, “reversible coloring” means a change in the color of skin keratin, hair keratin or nail keratin achieved using the method according to the invention which can be reversed.

[0096] For the purposes of the present invention, “backtranslation” means the translation of a Protein sequence into a nucleic acid sequence coding for this Protein. The backtranslation is thus a process of decoding an amino acid sequence into the nucleic acid sequence corresponding to it. Customary methods are based on codon usage tables of individual types, which are produced by computer-aided sequence comparisons. Using the codon usage tables it is possible to determine the codons used most frequently for a certain amino acid for a specific type. Protein backtranslation can be carried out using computer algorithms which are known to the person skilled in the art and specifically generated for this purpose (Andrés Moreira and Alejandro Maass. TIP: Protein backtranslation aided by genetic algorithms. Bioinformatics, Volume 20, Number 13 Pp. 2148-2149 (2004); G Pesole, M Attimonelli, and S Liuni. A backtranslation method based on codon usage strategy. Nucleic Acids Res. 1988 Mar. 11; 16(5 Pt A): 1715 1728.).

### DETAILED DESCRIPTION OF THE INVENTION

[0097] The present invention provides keratin-binding effector molecules comprising (a) at least one reactive dye (i) and (b) at least one keratin-binding polypeptide (ii).

[0098] In a preferred embodiment, the specified keratin-binding effector molecules comprise at least one keratin-binding polypeptide (ii) which has a binding affinity to human skin keratin, hair keratin or nail keratin. Keratin-binding polypeptide domains suitable according to the invention are present, for example, in the polypeptide sequences of desmoplakins, plakophilins, plakoglobins, plectins, periplakins, envoplakins, trichohyalins, epiplakins or hair follicle Proteins.

[0099] Preferably, the keratin-binding polypeptide (ii) specified under (b) comprises
[0100] (c) at least one polypeptide with one of the sequences shown in SEQ ID No.: 2, 4, 6, 8, 10, 12, 14, 16, 18, 20, 22, 24, 26, 28, 30, 32, 34, 36, 38, 40, 42, 44, 46, 48, 50, 52, 54, 56, 58, 60, 62, 64, 66, 68, 70, 72, 74, 76, 78, 80, 82, 84, 86, 88, 90, 92, 94, 96, 98, 100, 102, 104, 106, 108, 110, 112, 114, 116, 118, 120, 122, 124, 126, 128, 130, 132, 134, 136, 138, 140, 146, 150, 153, 156, 157, 158, 160, 162, 164, 166, 168 or 170, or
[0101] (d) a polypeptide which is at least 40% identical to at least one of the sequences according to SEQ ID No.: 2, 4, 6, 8, 10, 12, 14, 16, 18, 20, 22, 24, 26, 28, 30, 32, 34, 36, 38, 40, 42, 44, 46, 48, 50, 52, 54, 56, 58, 60, 62, 64, 66, 68, 70, 72, 74, 76, 78, 80, 82, 84, 86, 88, 90, 92, 94, 96, 98, 100, 109, 104, 106, 108, 110, 112, 114, 116, 118, 120, 122, 124, 126, 128, 130, 132, 134, 136, 138, 140, 146, 150, 153, 156, 157, 158, 160, 162, 164, 166, 168 or 170 and is able to bind keratin.

[0102] Preferably, the specified keratin-binding effector molecules comprise at least one keratin-binding polypeptide (ii), which is encoded by a nucleic acid molecule, comprising at least one nucleic acid molecule chosen from the group consisting of:
[0103] c) nucleic acid molecule which encodes a polypeptide, comprising the sequence shown in SEQ ID No.: 2, 4, 6, 8, 10, 12, 14, 16, 18, 20, 22, 24, 26, 28, 30, 32, 34, 36, 38, 40, 42, 44, 46, 48, 50, 52, 54, 56, 58, 60, 62, 64, 66, 68, 70, 72, 74, 76, 78, 80, 82, 84, 86, 88, 90, 92, 94, 96, 98, 100, 102, 104, 106, 108, 110, 112, 114, 116, 118, 120, 122, 124, 126, 128, 130, 132, 134, 136, 138, 140, 146, 150, 153, 156, 157, 158, 160, 162, 164, 166, 168 or 170;
[0104] d) b) nucleic acid molecule which comprises at least one polynucleotide of the sequence shown in SEQ ID No.: 1, 3, 5, 7, 9, 11, 13, 15, 17, 19, 21, 23, 25, 27, 29, 31, 33, 35, 37, 39, 41, 43, 45, 47, 49, 51, 53, 55, 57, 59, 61, 63, 65, 67, 69, 71, 73, 75, 77, 79, 81, 83, 85, 87, 89, 91, 93, 95, 97, 99, 101, 103, 105, 107, 109, 111, 113, 115, 117, 119, 121, 123, 125, 127, 129, 131, 133, 135, 137, 139, 145, 149, 152, 159, 161, 163, 165, 167 or 169;
[0105] c) nucleic acid molecule which encodes a polypeptide according to the sequences SEQ ID No.: 2, 4, 6, 8, 10, 12, 14, 16, 18, 20, 22, 24, 26, 28, 30, 32, 34, 36, 38, 40, 42, 44, 46, 48, 50, 52, 54, 56, 58, 60, 62, 64, 66, 68, 70, 72, 74, 76, 78, 80, 82, 84, 86, 88, 90, 92, 94, 96, 98, 100, 102, 104, 106, 108, 110, 112, 114, 116, 118, 120, 122, 124, 126, 128, 130, 132, 134, 136, 138, 140, 146, 150, 153, 156, 157, 158, 160, 162, 164, 166, 168 or 170;
[0106] j) nucleic acid molecule with a nucleic acid sequence corresponding to at least one of the sequences according to SEQ ID No.: 1, 3, 5, 7, 9, 11, 13, 15, 17, 19, 21, 23, 25, 27, 29, 31, 33, 35, 37, 39, 41, 43, 45, 47, 49, 51, 53, 55, 57, 59, 61, 63, 65, 67, 69, 71, 73, 75, 77, 79, 81, 83, 85, 87, 89, 91, 93, 95, 97, 99, 101, 103, 105, 107, 109, 111, 113, 115, 117, 119, 121, 123, 125, 127, 129, 131, 133, 135, 137, 139, 145, 149, 152, 159, 161, 163, 165, 167 or 169 or a nucleic acid molecule derived therefrom by substitution, deletion or insertion which encodes a polypeptide which is at least 40% identical to at least one of the sequences according to SEQ ID No.: 2, 4, 6, 8, 10, 12, 14, 16, 18, 20, 22, 24, 26, 28, 30, 32, 34, 36, 38, 40, 42, 44, 46, 48, 50, 52, 54, 56, 58, 60, 62, 64, 66, 68, 70, 72, 74, 76, 78, 80, 82, 84, 86, 88, 90, 92, 94, 96, 98, 100, 102, 104, 106, 108, 110, 112, 114, 116, 118, 120, 122, 124, 126, 128, 130, 132, 134, 136, 138, 140, 146, 150, 153, 156, 157, 158, 160, 162, 104, 166, 168 or 170 and is able to bind to keratin;
[0107] k) nucleic acid molecule which encodes a polypeptide which is recognized by a monoclonal antibody directed toward a polypeptide which is encoded by the nucleic acid molecules as in to (a) to (c);
[0108] l) nucleic acid molecule coding for a keratin-binding Protein which hybridizes under stringent conditions with a nucleic acid molecule as in (a) to (c);
[0109] m) nucleic acid molecule coding for a keratin-binding Protein which can be isolated from a DNA bank using a nucleic acid molecule as in (a) to (c) or part fragments thereof comprising at least 15 nt, preferably 20 nt, 30 nt, 50 nt, 100 nt, 200 nt or 500 nt as probe under stringent hybridization conditions, and
[0110] n) nucleic acid molecule which can be produced by backtranslation of one of the amino acid sequences shown in the sequences SEQ ID No.: 2, 4, 6, 8, 10, 12, 14, 16, 18, 20, 22, 24, 26, 28, 30, 32, 34, 36, 38, 40, 42, 44, 46, 48, 50, 52, 54, 56, 58, 60, 62, 64, 66, 68, 70, 72, 74, 76, 78, 80, 82, 84, 86, 88, 90, 92, 94, 96, 98, 100, 102, 104, 106, 108, 110, 112, 114, 116, 118, 120, 122, 124, 126, 128, 130, 132, 134, 136, 138, 140, 146, 150, 153, 156, 157, 158, 160, 162, 164, 166, 168 or 170.

[0111] In a preferred embodiment of the present invention, the said keratin-binding effector molecules comprise desmoplakins or part fragments thereof according to the sequences SEQ ID No.: 2, 42, 44, 46, 48, 146, 150, 153, 156, 157, 158, 160, 162, 164 or 166, and/or plakophillins or part sequences thereof according to the sequences SEQ ID No.: 18, 20, 26, 28, 32, 34, 36, 168, 170 and/or plakoglobins or part sequences thereof according to the sequences with the SEQ ID No.: 50, 52, 54, 56, 58, 60, 62, 64, 66, 68, 70, and/or the periplakin according to the sequence with the SEQ ID No.: 86, and/or envoplakins or part sequences thereof according to the sequences with the SEQ ID No.: 90, 92, 94, 96, 98, 102, 104, 105 and/or the sequences according to SEQ ID No.: 138 and 140 as keratin-binding polypeptides. Preferred keratin-binding domains are the desmoplakin polypeptides depicted in the sequences SEQ ID NOs: 4, 6, 8, 10, 12, 14, 146, 150, 153, 156, 157, 158, 160, 162, 164, 166, 168 or 170, and their functional equivalents. In a very particularly preferred embodiment of the present invention, the keratin-binding polypeptides depicted in the sequences SEQ ID No.: 156, 157, 158, 160, 162, 164, 168 and/or 170 are used in the method according to the invention. In an embodiment of the present invention which is preferred most of all, the keratin-binding Protein shown in the sequence SEQ ID No.: 168 is used. It goes without saying here that this Protein can be used either with or without the histidine anchors present in the SEQ ID No.: 168. Thus, the histidine anchor (or a purification/detection system to be used analogously) can also be present C-terminally. In practical use of said keratin-binding Proteins (e.g. in cosmetic preparations), a histidine anchor (or a purification/detection system to be used analogously) is not necessary. The use of said Proteins without additional amino acid sequences is thus preferred.

[0112] Likewise included according to the invention are “functional equivalents” of the specifically disclosed keratin-binding polypeptides (ii) and the use of these in the method according to the invention.

[0113] For the purposes of the present invention, “functional equivalents” or analogs of the specifically disclosed keratin-binding polypeptides (ii) are polypeptides different therefrom which also have the desired biological activity, such as, for example, keratin binding. Thus, for example, “functional equivalents” of keratin-binding polypeptides are understood as meaning those polypeptides which, under otherwise comparable conditions, in the quantitative keratin-binding tests described in the examples, have about 10%, 20%, 30%, 40% or 50%, preferably 60%, 70%, 80% or 90%, particularly preferably 100%, 125%, 150%, very particularly preferably 200%, 300% or 400%, most preferably 500%, 600%, 700% or 1000% or more of the keratin-binding capacity of the polypeptides shown under the SEQ ID No.: 2, 4, 6, 8, 10, 12, 14, 16, 18, 20, 22, 24, 26, 28, 30, 32, 34, 36, 38, 40, 42, 44, 46, 48, 50, 52, 54, 56, 58, 60, 62, 64, 66, 68, 70, 72, 74, 76, 78, 80, 82, 84, 86, 88, 90, 92, 94, 96, 98, 100, 102, 104, 106, 108, 110, 112, 114, 116, 118, 120, 122, 124, 126, 128, 130, 132, 134, 136, 138, 140, 146, 150, 153, 156, 157, 158, 160, 162, 164, 166, 168 or 170, preferably in SEQ ID No.: 2, 4, 6, 8, 10, 12, 14, 40, 42, 44, 46, 48, 146, 150, 153, 156, 157, 158, 160, 162, 164, 166, 168 or 170, particularly preferably 166 and 168, most preferably 168.

[0114] According to the invention, “functional equivalents” are understood in particular as meaning also muteins which have an amino acid other than that specifically given in at least one sequence position of the abovementioned amino acid sequences but nevertheless have one of the abovementioned biological activities. “Functional equivalents” thus include the muteins obtainable by a mutation where the specified changes can arise in any sequence position provided they lead to a mutein with the profile of properties according to the invention.

[0115] For the purposes of the present invention, “mutation” means the change in the nucleic acid sequence of a gene variant in a plasmid or in the genome of an organism. Mutations can arise, for example, as a result of errors during replication, or be caused by mutagens. The rate of spontaneous mutations in the cell genome of organisms is very low although a large number of biological, chemical or physical mutagens is known to the knowledgeable person skilled in the art.

[0116] Mutations include substitutions, insertions, deletions of one or more nucleic acid radicals. Substitutions are understood as meaning the replacement of individual nucleic acid bases, a distinction being made here between transitions (substitution of a purine base for a purine base or a pyrimidine base for a pyrimidine base) and transversions (substitution of a purine base for a pyrimidine base (or vice versa)).

[0117] Additions or insertions are understood as meaning the incorporation of additional nucleic acid radicals into the DNA, possibly resulting in shifts in the reading frame. With reading frame shifts of this typo, a distinction is made between “in frame” insertions/additions and “out of frame” insertions. In the case of “in frame” insertions/additions, the reading frame is retained and a polypeptide enlarged by the number of amino acids encoded by the inserted nucleic acids arises. In the case of “out of frame” insertions/additions, the original reading frame is lost and the formation of a complete and functioning polypeptide is no longer possible.

[0118] Deletions describe the loss of one or more base pairs, which likewise lead to “in frame” or “out of frame” shifts in the reading frame and the consequences associated therewith regard to the formation of an intact Protein.

[0119] The mutagenic agents (mutagens) which can be used for producing random or targeted mutations and the applicable methods and techniques are known to the person skilled in the art. Such methods and mutagens are described, for example, in A. M. van Harten [(1998), “Mutation breeding: theory and practical applications”, Cambridge University Press, Cambridge, UK], E Friedberg, G Walker, W Siede [(1995), “DNA Repair and Mutagenesis”, Blackwell Publishing], or K. Sankaranarayanan, J. M. Gentile, L. R. Ferguson [(2000) “Protocols in Mutagenesis”, Elsevier Health Sciences].

[0120] For introducing targeted mutations, customary molecular biological methods and processes such as, for example, the in vitro MutagenEse Kit, LA PCR in vitro Mutagenesis Kit (Takara Shuzo, Kyoto) or the QuikChange® Kit from Stratagene or PCR mutageneses using suitable primers can be used.

[0121] As already discussed above, there is a large number of chemical, physical and biological mutagens.

[0122] The mutagens listed below are given by way of example, but are non-limiting.

[0123] Chemical mutagens can be subdivided according to their mechanism of action. Thus, there are base analogs (e.g. 5-bromouracil, 2-aminopurine), mono- and bifunctional alkylating agents (e.g. monofunctional ones such as ethylmethylsulfonate, dimethyl sulfate, or bifunctional ones such as dichloroethyl sulfite, mitomycin, nitrosoguanidines-dialkylnitrosamines, N-nitrosoguanidine derivatives) or intercalating substances (e.g. acridines, ethidium bromide).

[0124] Thus, for example, in the keratin-binding effector molecules according to the invention, it is also possible for those polypeptides to be present which are obtained as a result of a mutation of a polypeptide according to the invention e.g. according to SEQ ID No.: 2, 4, 6, 8, 10, 12, 14, 16, 18, 20, 22, 24, 26, 28, 30, 32, 34, 36, 38, 40, 42, 44, 46, 48, 50, 52, 54, 56, 58, 60, 62, 64, 66, 68, 70, 72, 74, 76, 78, 80, 82, 84, 86, 88, 90, 92, 94, 96, 98, 100, 102, 104, 106, 108, 110, 112, 114, 116, 118, 120, 122, 124, 126, 128, 130, 132, 134, 136, 138, 140, 146, 150, 153, 156, 157, 158, 160, 162, 164, 166, 168 and/or 170.

[0125] Examples of suitable amino acid substitutions are given in the table below:

TABLE 4
Suitable amino acid substitutions

| Original radical | Examples of substitution |
|---|---|
| Ala | Ser |
| Arg | Lys |
| Asn | Gln; His |
| Asp | Glu |
| Cys | Ser or Ala |
| Gln | Asn |
| Glu | Asp |
| Gly | Pro |
| His | Asn; Gln |
| Ile | Leu; Val |
| Leu | Ile; Val |
| Lys | Arg; Gln; Glu |
| Met | Leu; Ile |
| Phe | Met; Leu; Tyr |
| Ser | Thr |
| Thr | Ser |
| Trp | Tyr |
| Tyr | Trp; Phe |
| Val | Ile; Leu |

[0126] It is known that in SEQ ID NO: 2, the serine naturally present at position 2849 can, for example, be replaced by glycine in order to avoid a phosphorylation at this position (Fontao L, Favre B, Riou S, Geerts D, Jaunin F, Saurat J H, Green K J, Sonnenberg A, Rorradori L., Interaction of the bullous pemphigoid antigen 1 (BP230) and desmoplakin with intermediate filaments is mediated by distinct sequences within their COOH terminus, Mol Biol Cell. 2003 May; 14(5):1978-92. Epub 2003 Jan. 26).

[0127] In the above sense, “functional equivalents” are also “precursors” of the described polypeptides, and “functional derivatives” and “salts” of the polypeptides.

[0128] Here, “precursors” are natural or synthetic precursors of the polypeptides with or without desired biological activity.

[0129] The expression “salts” is understood as meaning either salts of carboxyl groups or acid addition salts of amino groups of the Protein molecules according to the invention. Salts of carboxyl groups can be prepared in a manner known per se and include inorganic salts, such as, for example, sodium, calcium, ammonium, iron and zinc salts, and also salts with organic bases, such as, for example, amines such as triethylamine, arginine, lysine, piperidine and the like. Acid addition salts, such as, for example, salts with mineral acids, such as hydrochloric acid or sulfuric acid, and salts with organic acids, such as acetic acid and oxalic acid, are likewise provided by the invention.

[0130] “Functional equivalents” naturally also include polypeptides which are accessible from other organisms, and naturally occurring variants (alleles). For example, through sequence comparisons, areas of homologous sequence regions or preserved regions can be determined. Using these sequences, DNA databases (e.g. genomic or cDNA databases) can be inspected for equivalent enzymes using bioinformatic comparison programs. Suitable computer programs and databases which are accessible to the public are sufficiently known to the person skilled in the art.

[0131] These alignments of known Protein sequences can be carried out, for example, using a computer program such as Vector NTI 8 (version from 25 Sep. 2002) from InforMax Inc.

[0132] Furthermore, “functional equivalents” are fusion Proteins which have one of the abovementioned polypeptide sequences or functional equivalents derived therefrom and have at least one further heterologous sequence functionally different therefrom in functional N- or C-terminal linkage (i.e. without mutual essential functional impairment of the fusion Protein parts). Nonlimiting examples of such heterologous sequences are, for example, signal peptides or enzymes.

[0133] “Functional equivalents” included according to the invention are homologs to the specifically disclosed Proteins. These have at least 40%, 45% or 50%, preferably at least 55%, 60%, 65% or 70%, particularly preferably at least 75%, 80%, 85%, 90%, 91%, 92%, 93% or 94%, very particularly preferably at least 95% or 96% homology to one of the specifically disclosed amino acid sequences, calculated using the computer programs and computer algorithms disclosed in the definitions.

[0134] In the case of a possible Protein glycosylation, “functional equivalents” according to the invention include Proteins of the type referred to above in deglycosylated or glycosylated form, and also modified forms obtainable by changing the glycosylation pattern.

[0135] In the case of a possible Protein phosphorylation, “functional equivalents” according to the invention include Proteins of the type referred to above in dephosphorylated or phosphorylated form, and also modified forms obtainable by changing the phosphorylation pattern.

[0136] Homologs of the polypeptides according to the invention can be identified by screening combinatorial banks of mutants, such as, for example, shortening mutants. For example, a bank of Protein variants can be produced by combinatorial mutagenesis at nucleic acid level, such as, for example, by enzymatic ligation of a mixture of synthetic oligonucleotides. There is a large number of methods which can be used for producing banks of potential homologs from a degenerated oligonucleotide sequence. The chemical synthesis of a degenerated gene sequence can be carried out in an automatic DNA synthesis machine, and the synthetic gene can then be ligated into a suitable expression vector. The use of a degenerated set of genes makes it possible to provide all of the sequences in one mixture which encode the desired set of potential Protein sequences. Methods for synthesizing degenerated oligonucleotides are known to the person skilled in the art (e.g. Narang, S. A. (1983) Tetrahedron 39:3; Itakura et al. (1984) Annu. Rev. Biochem. 53:323; Itakura et al., (1984) Science 198.1056; Ike et al. (1983) Nucleic Acids Res. 11:477).

[0137] In the prior art, a number of techniques for the screening of gene products of combinatorial banks which have been produced by point mutations or shortening, and for the screening of cDNA banks for gene products with a selected property are known. The most often used techniques for screening large gene banks which are subjected to analysis with a high throughput include the cloning of the gene bank in replicable expression vectors, transforming the suitable cells with the resulting vector bank and expressing the combinatorial genes under conditions under which the detection of the desired activity facilitates the isolation of the vector which encodes the gene whose product has been detected. Recursive ensemble mutagenesis (REM), a technique which increases the frequency of functional mutants in the banks can be used in combination with the screening tests in order to identify homologs (Arkin and Yourvan (1992) PNAS 89:7811-7815; Dolgrave et al. (1993) Protein Engineering 6(3):327-331). The inspection of physically available cDNA or genomic DNA libraries of other organisms using the nucleic acid sequences described under SEQ ID No.: 1, 3, 5, 7, 9, 11, 13, 15, 17, 19, 21, 23, 25, 27, 29, 31, 33, 35, 37, 39, 41, 43, 45, 47, 49, 51, 53, 55, 57, 59, 61, 63, 65, 67, 69, 71, 73, 75, 77, 79, 81, 83, 85, 87, 89, 91, 93, 95, 97, 99, 101, 103, 105, 107, 109, 111, 113, 115, 117, 119, 121, 123, 125, 127, 129, 131, 133, 135, 137, 139, 145, 149, 152, 159, 161, 163, 165, 167 and/or 169, particularly preferably 165 and 167, most preferably 167, or parts thereof as probe is a method known to the person skilled in the art for identifying homologs in other ways. Here, the probes derived from the nucleic acid sequence according to SEQ ID No.: 1, 3, 5, 7, 9, 11, 13, 15, 17, 19, 21, 23, 25, 27, 29, 31, 33, 35, 37, 39, 41, 43, 45, 47, 49, 51, 53, 55, 57, 59, 61, 63, 65, 67, 69, 71, 73, 75, 77, 79, 81, 83, 85, 87, 89, 91, 93, 95, 97, 99, 101, 103, 105, 107, 109, 111, 113, 115, 117, 119, 121, 123, 125, 127, 129, 131, 133, 135, 137, 139, 145, 149, 152, 159, 161, 165, 167 and/or 169, particularly preferably 165 and 167, most preferably 167, have a length of at least 20 bp, preferably at least 50 bp, particularly preferably at least 100 bp, very particularly preferably at least 200 bp, most preferably at least 400 bp. The probe can also be one or more kilobases long, e.g. 1 Kb, 1.5 Kb or 3 Kb. For inspecting the libraries it may also be possible to use one of the sequences of complementary DNA strand described under SEQ ID No.: 1, 3, 6, 7, 9, 11, 13, 15, 17, 19, 21, 23, 25, 27, 29, 31, 33, 35, 37, 39, 41, 43, 45, 47, 49, 51, 53, 55, 57, 59, 61, 63, 65, 67, 69, 71, 73, 75, 77, 79, 81, 83, 85, 87, 89, 91, 93, 95, 97, 99, 101, 103, 105, 107, 109, 111, 113, 115, 117, 119, 121, 123, 125, 127, 129, 131, 133, 135, 137, 139, 145, 149, 152, 159, 161, 165, 167 and/or 169, particularly preferably 165 and 167, most preferably 167, or a fragment thereof with a length between 20 bp and several kilobases. The hybridization conditions to be used are described above.

[0138] In the method according to the invention, it is also possible to use those DNA molecules which, under standard conditions, hybridize with the nucleic acid molecules described by SEQ ID No.: 1, 3, 5, 7, 9, 11, 13, 15, 17, 19, 21, 23, 25, 27, 29, 31, 33, 35, 37, 39, 41, 43, 45, 47, 49, 51, 53, 55, 57, 59, 61, 63, 65, 67, 69, 71, 73, 75, 77, 79, 81, 83, 85, 87, 89, 91, 93, 95, 97, 99, 101, 103, 105, 107, 109, 111, 113, 115, 117, 119, 121, 123, 125, 127, 129, 131, 133, 135, 137, 139, 145, 149, 152, 159, 161, 165, 167 and/or 169, particularly preferably 165 and 167, most preferably 167, and encoding keratin-binding polypeptides, which hybridize to these complementary nucleic acid molecules or parts of the above, and as complete sequences encode polypeptides which have the same properties as the polypeptides described under SEQ ID No.: 2, 4, 6, 8, 10, 12, 14, 16, 18, 20, 22, 24, 26, 28, 30, 32, 34, 36, 38, 40, 42, 44, 46, 48, 50, 52, 64, 56, 58, 60, 62, 64, 66, 68, 70, 72, 74, 76, 78, 80, 82, 84, 86, 88, 90, 92, 94, 96, 98, 100, 102, 104, 106, 108, 110, 112, 114, 116, 118, 120, 122, 124, 126, 128, 130, 132, 134, 136, 138, 140, 146, 150, 153, 156, 157, 158, 160, 162, 164, 166, 168 or 170.

[0139] In a particularly advantageous embodiment of the invention, the keratin-binding effector molecules comprise, as keratin-binding polypeptides (ii), those polypeptides which comprise at least one of the polypeptide sequences as shown in SEQ ID No.: 2, 4, 6, 8, 10, 12, 14, 16, 18, 20, 22, 24, 26, 28, 30, 32, 34, 36, 38, 40, 42, 44, 46, 48, 50, 52, 54, 56, 58, 60, 62, 64, 66, 68, 70, 72, 74, 76, 78, 80, 82, 84, 86, 88, 90, 92, 94, 96, 98, 100, 102, 104, 106, 108, 110, 112, 114, 116, 118, 120, 122, 124, 126, 128, 130, 132, 134, 136, 138, 140, 146, 150, 153, 156, 157, 158, 160, 162, 164, 160, 108 or 170, with the proviso that the keratin binding of said polypeptides is at least 10%, 20%, 30%, 40% or 50%, preferably 60%, 70%, 80% or 90%, particularly preferably 100%, of the value which the corresponding polypeptide sequences as shown in SEQ ID No.: 2, 4, 6, 8, 10, 12, 14, 16, 18, 20, 22, 24, 26, 28, 30, 32, 34, 36, 38, 40, 42, 44, 46, 48, 50, 52, 54, 56, 58, 60, 62, 64, 66, 68, 70, 72, 74, 76, 78, 80, 82, 84, 86, 88, 90, 92, 94, 96, 98, 100, 102, 104, 106, 108, 110, 112, 114, 116, 118, 120, 122, 124, 126, 128, 130, 132, 134, 136, 138, 140, 146, 150, 153, 156, 157, 158, 160, 162, 164, 166, 168 or 170 have, measured in the test according to Example 9 or 10.

[0140] Preference is given to using keratin-binding polypeptides (ii) which have a highly specific affinity for the desired organism. Accordingly, for uses for human hair coloring, preference is given to using those keratin-binding polypeptides (ii) which have a particularly high affinity to human hair keratin.

[0141] However, it is also possible to use more than one keratin-binding polypeptide (ii) coupled to the effector molecule (i) according to the invention, for example a keratin-binding polypeptide (ii) which has a high binding affinity to human skin keratin can be combined with an effector molecule in combination with another keratin-binding polypeptide (ii) which has a high affinity to human hair keratin. It is also possible to use chimeric polypeptides which comprise two or more copies of the same (and also different) keratin-binding polypeptides (ii) or keratin-binding domains thereof. For example, it was thus possible to achieve particularly effective keratin binding.

[0142] Suitable keratin-binding polypeptides (ii) are known. For example, desmoplakins and plectins comprise keratin-binding domains (Fontao L, Favre B, Riou S, Geerts D, Jaunin F, Saurat J H, Green K J, Sonnenberg A, Borradori L., Interaction of the bullous pemphigoid antigen 1 (BP230) and desmoplakin with intermediate filaments is mediated by distinct sequences within their COOH terminus, Mol Biol Cell. 2003 May; 14(5):1978-92. Epub 2003 Jan. 26; Hopkinson S B, Jones J C., The N-terminus of the transmembrane Protein BP180 interacts with the N-terminal domain of BP230, thereby mediating keratin cytoskeleton anchorage to the cell surface at the site of the hemidesmosome, Mol Biol Cell. 2000 January; 11(1): 277-86).

[0143] Preferably, the keratin-binding effector molecules according to the invention are used in hair cosmetics, preferably hair coloring. They permit a high concentration and long actin time of care, predecting or color-changing effector molecules.

[0144] In a particularly preferred embodiment of the present invention, keratin-binding polypeptides are used which has a binding affinity to human skin keratin, hair keratin or nail keratin.

[0145] In a further preferred embodiment of the present invention, the specified keratin-binding effector molecules comprise at least one reactive dye (ii) which has at least one reactive anchor, chosen from the group consisting of

(a) a group of the formula 1 activatable under alkaline conditions,

[chemical structure]

[0146] in which
[0147] [symbol] means the bond to the dye molecule (D),
[0148] X is an electron-withdrawing radical or is an alkyl, —O-alkyl, cyano, hydroxy, halogen radical or H,
[0149] k is 1, 2 or 3,
[0150] n is 0 or 1, and
[0151] B is a group —CH═CH₂ or a group —CH₂—CH₂-Q or —NH—CH₂—CH₂-Q or —NH—CH═CH₂, in which 0 is a group which can be cleaved off under alkaline conditions, and
   (b) an acrylamido anchor of formula 2,

[chemical structure]

[0152] in which
[0153] [symbol] means the bond to the dye molecule (D), and
   (c) one of the compounds according to formulae 3, 4 or 5,

[chemical structure]

in which [symbol]
means the bond to the dye molecule (D),
V is fluorine or chlorine;
U₁, U₂, independently of one another, are fluoro, chloro or hydrogen; and
Q₁, Q₂, independently of one another, are chloro, fluoro, cyanamido, hydroxy, (C₁-C₆)-alkoxy, phenoxy, sulfophenoxy, mercapto, (C₁-C₆)-alkylmercapto, pyridino, carboxypyridino, carbamoylpyridino, or a group of the general formula (6) or (7),

[chemical structure]

in which R² is hydrogen or (C₁-C₆)-alkyl, sulfo-(C₁-C₆)-alkyl, or phenyl, which is unsubstituted or substituted by (C₁-C₄)-alkyl, (C₁-C₄)-alkoxy, sulfo, halogen, carboxy, acetamido, ureido; R³ and R⁴, independently of one another, have one of the meanings of R², or are a group of the general formula (8),

[chemical structure]

or form a cyclic ring system of the formula —(CH₂)ⱼ—, where j is 4 or 5, or alternatively —(CH₂)₂-E-(CH₂)₂—, where E is oxygen, sulfur, sulfo, —NR⁵— where R^{5′}=(C₁-C₆)-alkyl;
W is phenylene which is unsubstituted or substituted by 1 or 2 substituents, such as (C₁-C₄)-alkyl, (C₁-C₄)-alkoxy, carboxy, sulfo, chloro, bromo, or is (C₁-C₄)-alkylene-arylene or (C₂-C₆)-alkylene, which may be interrupted by oxygen, sulfur, sulfo, amino, carbonyl, carbonamido, or is phenylene-CONH-phenylene which is unsubstituted or substituted by (C₁-C₄)-alkyl, (C₁-C₄)-alkoxy, hydroxy, sulfo, carboxy, amido, ureido or halogen, or is naphthylene which is unsubstituted or substituted by one or two sulfo groups; and
Z is a group CH═CH₂ or a group CH₂—CH₂-Q or —NH—CH₂—CH₂-Q or —NH—CH═CH₂, in which Q is a group which can be cleaved off under alkaline conditions;
R²⁴, R²⁵ and R²⁶ are (C₁-C₄)-alkyl or (C₁-C₄)-hydroxyalkyl;
B— is the equivalent of an anion, such as hydrogensulfate, sulfate, fluoride, chloride, bromide, dihydrogenphosphate, hydrogenphosphate, phosphate, hydroxide or acetate.

[0154] Accordingly, the present invention relates, in a preferred embodiment, to a keratin-binding effector molecule which comprises, as effector molecule, at least one reactive dye (ii) which has at least one group of the formula I which is activatable under alkaline conditions

[chemical structure]

[0155] in which
[0156] [symbol] is the bond to the radical of the dye molecule (D);
[0157] X is an electron-withdrawing radical,
[0158] k is 1, 2 or 3,
[0159] n is 0 or 1, and
[0160] B is a group CH═CH₉ or a group CH₂—CH₂-Q or —NH—CH₂—CH₂-Q or —NH—CH═CH₂, in which Q is a group which can be cleaved off under alkaline conditions.

[0161] Here and below, the expression alkyl is usually a linear or branched hydrocarbon radical having 1 to 6 and preferably 1 to 4 carbon atoms (C₁-C₆- or C₁-C₄-alkyl), such as methyl, ethyl, propyl, isopropyl and the like. Haloalkyl is alkyl, as defined above, in which the hydrogen atoms are partly or completely replaced by halogen atoms, in particular by fluorine atoms, as in trifluoromethyl, trichloromethyl, pentafluoroethyl, and the like. Alkoxy is an alkyl radical bonded via an oxygen atom, as defined above. Optionally substituted phenyl means that the phenyl radical can have one or more, e.g. 1, 2, 3 or 4, substituents, which are chosen, for example, from halogen, alkyl, alkoxy, nitro, cyano, COOH, SO₃H and the like. Halogen is in particular fluorine, chlorine or bromine.

[0162] Electron-withdrawing radicals X are those which exert an -M and/or -I effect on the aromatic radical to which they are bonded. These include, for example, fluorine or chlorine, CN, NO₂, and groups of the formulae —C(O)—R¹ and S(O)₂R², in which R¹ and R², independently of one another, are OH, alkyl, haloalkyl, alkoxy or optionally substituted phenyl. If formula 1 has a plurality of groups (k>1), then the groups X may be identical or different.

[0163] Preferably, at least one of the groups X is a hydroxysulfonyl group (SO₃H).

[0164] The variable k is preferably 1 or 2, i.e. formula 1 has one or two electron-withdrawing radicals X. Preferably “n” in formula 1 is 0, i.e. formula 1 is derived from benzene. If “n” is 1, formula 1 is derived from naphthalene. In these cases, the group SO₂—B can be located on the same benzene ring as group X.

[0165] Furthermore, the invention relates to keratin-binding effector molecules which comprise a reactive dye which comprises a reactive anchor according to formula 1 and in which B in formula 1 is CH═CH₂, a group CH₂—CH₂—O—SO₃H or is CH₂—CH₂—Cl.

[0166] According to the invention, preference is given to the above described keratin-binding effector molecules in which the group of formula 1 which can be activated under alkaline conditions is bonded to the dye molecule via a group —NH—, —N═N—, —NH—C(O)—, —NH—SO₂— or —N(R)—, where R is alkyl (as defined above). Expediently, keratin-binding effector molecules according to the invention have 1, 2 or 3, preferably 1 or 2, of the abovementioned reactive dyes. The group according to formula 1 which can be activated under alkaline conditions can (but does not have to) be a constituent of the dye chromophore.

[0167] As a rule, the reactive dye has one or more, e.g. 1 to 10, in particular 2 to 8, functional groups per dye molecule which impart water solubility to the dye. These are generally anionic or acidic functional groups which, in an aqueous medium at a weakly acidic or alkaline pH, generally at a pH above 4, dissociate to form anionic groups. Examples of such groups are hydroxysulfonyl groups (—SO₃H), carboxyl groups (COOH) and hydroxysulfonyloxy groups (—O—SO₃H), and the anions of these groups. These anionic/acidic groups can be bonded to a group according to formula 1 and/or to other parts of the dye molecule. If these groups are present in the dye as anionic groups, it goes without saying that the dye also comprises the counterions required for neutralization. Suitable counterions are, in particular, alkali metal ions, specifically sodium, potassium and lithium ions, and ammonium ions, e.g. ammonium ions derived from mono-, di- or triethanolamine.

[0168] A particularly preferred subject matter of the invention is keratin-binding effector molecules which comprise dyes (“D”) chosen from the group of dyes of the phthalocyanine series, anthraquinone dyes, azo dyes, formazane dyes, dioxazine dyes, actidine dyes, xanthene dyes, polymethine dyes, stilbene dyes, sulfur dyes, triarylmethane dyes, benzopyran dyes, dibenzanthrone dyes and the metal complexes of these dyes.

[0169] Such dyes D are partly known from the prior art and can be found, for example, in the patent applications WO 04/18381, EP A 356 931, EP-A 559 617, EP-A 201 868, DE-A 195 23 245, DE-A 197 31 166, EP 745 640, EP-A 889 098, EP-A 1 097 971, EP-A 880 098, or are prepared analogously to known preparation processes for structurally similar dyes, as are known, for example, from the documents EP 602 562, EP-A 597 411, EP-A 592 105 or DE 43 196 74.

[0170] To prepare the reactive dyes comprising reactive anchor according to formula 1, an amino compound of formula 1b will generally be reacted with a dye precursor which has a nucleophilically displaceable group in a manner known per se. Examples of nucleophilically displaceable groups are halogen, in particular chlorine or bromine, which is bonded to an aromatic (as in halotriazine radicals) or in the form of a halosulfonyl group or a halocarbonyl group. Processes for this are known from the prior art cited here and can be used analogously for the preparation of the dyes D. Alternatively, the amino compound 1b can also firstly be diazotized and then coupled to a corresponding dye precursor. The reaction product obtained in the reaction of the amino compound 1b or its diazonium salt with the dye precursor may already be the dye D or for its part represent a precursor of the dye D which is further processed to give the dye D analogously to known processes.

[chemical structure]

[0171] The radicals shown in formula 1b correspond to the definitions given in formula 1. It should be taken into consideration here that dyes can comprise inorganic salts and extenders as a result of the preparation. The content of such constituents, also referred to below as noncolored constituents, will generally not be more than 60% by weight and is often in the range from 10 to 50% by weight, based on the total weight of colored and noncolored constituents in the dye.

[0172] The chromophore systems of the dyes (D) can have different structures irrespective of whether they are reactive or nonreactive dyes. The chromophores (1 to 7) shown below are in each case compound specified by way of representation for a certain structural class. This list is not to be understood as restrictive. The person skilled in the art is of course aware that in principle all dyes belonging to these classes of substances can be bonded to a keratin-binding polypeptide directly as reactive dye or via a linker molecule. The dyes can be metal-free dyes, but also metal complexes, preferably transition metal complexes, in particular complexes of the transition metals of groups VI to X of the periodic table of the elements and, of these, in particular of Cu, Cr, Fe, Ni, Co and Mn. The molar ratio of transition metal to dye molecule in these metal complexes is usually in the range from 2:1 to 1:2. As a rule, complexation of the metal ions in these dyes takes place via depredonated hydroxyl groups, via amino groups, imino groups, nitrogen atoms which are incorporated into an aromatic π-electron system, or via azo groups.

### 1. Azo Dyes

[0173] Mono-, bis-, tris-, tetra- and polyazo dyes depending on how many azo bridges (—N═N—) the dyes comprise. The bond to the reactive anchor in 1a, 1b and 1c is of course also an azo bridge.

[chemical structure]

### 2. Anthraquinone Dyes

[chemical structure]

### 3. Triphendioxazine Dyes

[chemical structure]

### 4. Phthalocyanine Dyes

[chemical structure]

### 5. Benzopyran Dyes

[chemical structure]

### 6. Dibenzanthrone Dyes

[chemical structure]

### 7. Formazane Dyes

[chemical structure]

[0180] According to the invention, preference is also given to keratin-binding effector molecules which comprise a reactive dye (i) which comprises a reactive anchor which is chosen from the following radicals (1-1) to (1-43),

[chemical structure]

[chemical structure]

[chemical structure]

[chemical structure]

[chemical structure]

[0181] Particularly preferred reactive dyes comprise at least one reactive anchor according to formula 1, where this radical has at least one of the groups shown in the formulae (1-1) to (1-12) and (1-16), (1-17), preferably (1-1), (1-3), (1-4), (1-6), (1-7), (1-9), (1-10), (1-12), (1-16), (1-17), most preferably (1-1), (1-4), (1-7), (1-10), (1-17).

[0182] In the reaction of dyes (D) with a keratin-binding polypeptide, virtually physiological conditions should be maintained since the polypeptide or Protein otherwise untolds, resulting in a precipitation. This essentially means that no pure organic solvents can be used, and a pH close to neutral should be chosen. Furthermore, it is important that the reaction temperatures for the coupling do not exceed 45° C.

[0183] Accordingly, in theory it is possible to use all reactive dyes which can react under mild conditions with the SH groups of the keratin-binding polypeptides. Mild conditions are understood as meaning temperature, pH and concentration ranges in which the keratin-binding polypeptide retains or does not irreversibly lose its physical and chemical properties.

[0184] Suitable reactive dyes comprise at least one reactive anchor, but can also comprise two or more reactive anchors, where these may correspond to different reactive anchor types.

[0185] Dyes comprising vinylsulfone anchors (see formula 1) are usually prepared as sulfuric ester compounds. Activation (elimination to the active vinylsulfone form) of the sulfuric ester compounds takes place in situ during the coloring for textile and leather applications, i.e. the dyes do not need to be preeliminated to the vinylsulfone prior to use. The dyes can, if appropriate, also be isolated as vinylsulfone and only be reacted with the substrate at a later time.

[0186] As a result of the fact that with the keratin-binding polypeptides according to the invention or the keratin-binding domain (also referred to below as KBD), a pH close to neutral is chosen, and furthermore the reaction temperature for the coupling with dyes should not exceed 45° C., the dyes must be preeliminated to the active vinylsulfone form and only then be coupled with, for example, a KBD. The reaction with, for example, a KBD can take place directly after the elimination in the same liquor (without isolation of the dye in the vinylsulfone form), or the dye can also be isolated.

[0187] For the activation, a pH range from 5-14, in particular 7-12 and a temperature range from 0-80° C., in particular 15-50° C., preferably 25-45° C., is required. After the activation, a pH range from pH 5-9, in particular 7-8, and a temperature range from 20-50° C., in particular 25-45° C., is established, with the dye reacting rapidly (often within minutes) with the substrate (in this case with a keratin-binding polypeptide/KBD). Activation (elimination) of the sulfuric ester to the vinylsulfone proceeds according to the scheme shown in FIG. 1.

[0188] After the activation (elimination), the reaction shown in FIG. 2 takes place. Dyes with acrylamido anchor (formula 2) can be reacted directly, without preelimination (activation) with, for example, the KBD. The reaction conditions correspond to the conditions chosen for the activation of the vinylsulfone anchor. In the case, both addition and substitution can take place. (J. Soc. Dyers and Colourist, 1982, 98, 165-175) (see FIG. 3).

[0189] Dyes with a heteroatomatic anchor (formulae 3, 4, 5) can be reacted directly and without preelimination (activation) with, for example, the KBD (FIG. 4). The reaction conditions correspond to the conditions chosen for the vinylsulfone anchors. The reactive dyes used here can comprise 0-20% by weight, usually 0-10% by weight, often 0-5% by weight, of nonreactive secondary components. The secondary components, which have no reactive anchor, naturally do not react with the keratin-binding polypeptides. These can be removed during the synthesis or the coloring process. One option is to apply the keratin-binding polypeptides reacted with the reactive dye to hair and to wash out the nonbonded dye fractions from the hair.

[0190] Furthermore, there is the option to purify the keratin-binding polypeptides reacted with the reactive dye by, for example, column chromatography. It is also possible to carry out the reaction between keratin-binding polypeptides and the reactive dye in a type of “column reactor”. Here, the keratin-binding polypeptides could be coupled to a nickel affinity column, the dye bonded to the keratin-binding polypeptides and the unfixed dye radicals washed out directly. The keratin-binding polypeptide dye (keratin-binding effector molecule) could then be eluted from the column.

[0191] In a particularly preferred embodiment of the present invention, the keratin-binding effector molecules comprise dyes which are suitable for cosmetic purposes and are approved as such. Such dyes are listed, for example, in the publication “Kosmetische Färbemittel” [Cosmetic Colorants] from the Forbstoffkommission der Deutschen Forschungsgemeinschaft [Dyes Commission of the German Research Society], published by Verlag Chemie, Weinheim, 1984, or in the third completely revised edition from 1991.

[0192] Further dyes customarily used in coloring hair and which may be present in the keratin-binding effector molecules according to the invention are described, inter alia, in E. Sagarin, “Cosmetics, Science and Technology”, Interscience Publishers Inc., New York (1957), pages 503 ff., and H. Janistyn, “Handbuch der Kosmetika und Riechstoffe” [Handbook of cosmetics and fragrances], volume 3 (1973), pages 388 ff. and K. Schrader, “Grundlagen und Rezepturen der Kosmetika” [Fundamentals and formulations of cosmetics], 2nd edition (1989), pages 782-815.

[0193] According to the invention, preference is also given to keratin-binding effector molecules in which the reactive dye (i) is coupled to the keratin-binding polypeptide (ii) indirectly via a linker molecule.

[0194] The preparation of such a keratin-binding effector molecule can take place by coupling an effector molecule (i) carrying at least one hydroxy, amino or carboxyl function (e.g. chosen from the reactive dyes described above) onto one of the keratin-binding polypeptides (ii) described above using a linker molecule which has at least two coupling functionalities, and
[0195] a) in a first coupling step, firstly the effector molecule (i) is bonded to the linker molecule (iii), and
[0196] b) in a further coupling step, the reaction product from (a) is coupled to the keratin binding polypeptide (ii) via still free coupling functionality of the linker molecule (iii).

[0197] In a particularly preferred embodiment of the invention, the linker molecule (iii) has at least two different coupling functionalities, very particularly preferred are linker molecules (iii) which have a maleimide group.

[0198] The linker molecules (iii) used are particularly preferably maleimides carrying carboxylic acid groups according to the general formula 9,

[chemical structure]

where “n” is an integer between 0 and 40 or 0-20, preferably between 0 and 15, particularly preferably between 0 and 10, very particularly preferably between 1 and 9, or between 2 and 8, or between 3 and 7, most preferably of all 5. The use of maleimidocoproic acid is the most preferred of all. In addition, the use of maleimidocaproic acid chloride is very particularly preferred.

[0199] In a further particularly preferred embodiment, the linker molecule (iii) has at least two different coupling functionalities and additionally a module which increases the hydrophilicity. This preferred linker molecule is depicted in formula 9b,

[chemical structure]

where “n” is an integer between 0 and 40 or 0 and 20, preferably between 0 and 15, particularly preferably between 0 and 10, very particularly preferably between 1 and 9, or between 2 and 8, or between 3 and 7, and X is the radicals O, S, N, CH₂, —O—C═O, O═C—O—, —NR, —NR—C═O, O═C—NR—, and R is H, C₁-C₁₂ branched or unbranched alkyl groups, such as methyl, ethyl, propyl, isopropyl, butyl, isobutyl, sec-butyl, tert-butyl, pentyl, isopentyl, neopentyl, tert-pentyl, hexyl, heptyl, octyl, nonyl, decyl, undecyl, dodecyl, or cycloalkyl, benzoyl, benzyl, C₆ to C₁₀ aryl groups, such as phenyl and naphthyl, heteroaryl, preferably H, methyl and ethyl, and
the “module” is an ethylene glycol or polyethylene glycol radical having 2 to 40, preferably 2 to 20, particularly preferably 2 to 10, repeat units, or an amino acid, preferably chosen from the group consisting of glycine, alanine, serine, threonine, glutamic acid, glutamine, aspartic acid, asparagine, arginine and cysteine, or a polypeptide having 2 to 40, preferably 2 to 20, particularly preferably 2 to 10, amino acids, where the amino acids are preferably polar amino acids, particularly preferably chosen from the group consisting of glycine, alanine, serine, threonine, glutamic acid, glutamine, aspartic acid, asparagine, arginine and cysteine, or a polyacrylic acid radical having 2-100, preferably 2-80, particularly preferably 2-50, most preferably 2-20, monomer units, or
for increasing the lipophilicity the “module” is an alkyl radical having 2-40 carbons or polyolefin radical having 2 to 40, preferably 2 to 20, particularly preferably 2 to 10, repeat units, or an amino acid, preferably chosen from the group consisting of glycine, valine, leucine, isoleucine, phenylalanine, tryptophan, proline, methionine, or a polypeptide having 2 to 40, preferably 2 to 20, particularly preferably 2 to 10, amino acids, where the amino acids are preferably nonpolar amino acids, particularly preferably chosen from the group consisting of glycine, valine, leucine, isoleucine, phenylalanine, tryptophan, proline, methionine, or a polyester, polyamide or polyurethane having 2-100, preferably 2-80, particularly preferably 2-50, most preferably 2-20 monomer units.

[0200] In a moreover preferred embodiment, the linker molecule is a molecule according to the general formula 9c,

[chemical structure]

where X in the o, m or p position is COOH or R—COOH, and R is a C₁-C₁₂ linear alkyl group such as methyl, ethyl, propyl, isopropyl, butyl, isobutyl, sec-butyl, tert-butyl, pentyl, isopentyl, neopentyl, tert-pentyl, hexyl, heptyl, octyl, nonyl, decyl, undecyl, dodecyl, or a cyclic alkyl group such as a C₅-C₁₂-cycloalkyl radical, optionally substituted by one or more C₁-C₄-alkyl groups, or an o-, m- or p-oriented aryl, benzyl or benzoyl unit, preferably cyclohexyl, phenyl and naphthyl.

[0201] In a further preferred embodiment, R can also be the “module” described in formula 1b.

[0202] In a further embodiment of the present invention, the linker molecules (ii) shown by the general formula 10 are used,

[chemical structure]

where “n” is an integer between 0 and 20, preferably between 0 and 15, particularly preferably between 1 and 10, very particularly preferably between 1 and 8, and Y is a hydroxy or amino group. Amino groups can be primary or secondary. The linker molecule (iii) is very particularly preferably a maleimidoalkanol. The maleimidoalkanols are preferably maleimidoethanol, most preferably of all maleimidopentanol.

[0203] In a further particularly preferred embodiment, the linker molecule (iii) according to formula 10 has at least two different coupling functionalities and additionally a module which increases the hydrophilicity or lipophilicity. This preferred linker molecule is shown in formula 10b,

[chemical structure]

where “n” is an integer between 0 and 40 or 0 and 20, preferably between 0 and 15, particularly preferably between 0 and 10, very particularly preferably between 1 and 9, or between 2 and 8, or between 3 and 7, and X is the radicals O, S, N, CH₂, —O—C═O, O═C—O—, —NR, —NR—C═O, O═C—NR—, and R is H, C₁-C₁₂ branched or unbranched alkyl groups, such as methyl, ethyl, propyl, isopropyl butyl, isobutyl, sec-butyl, tert-butyl, pentyl, isopentyl, neopentyl, tert-pentyl, hexyl, heptyl, octyl, nonyl, decyl, undecyl, dodecyl, or cycloalkyl, benzoyl, benzyl, C₆ to C₁₀-aryl groups, such as phenyl and naphthyl, heteroaryl, preferably H, methyl and ethyl, and
the “module” is an ethylene glycol or polyethylene glycol radical having 2 to 40, preferably 2 to 20, particularly preferably 2 to 10, repeat units, or an amino acid, preferably chosen from the group consisting of glycine, alanine, serine, threonine, glutamic acid, glutamine, aspartic acid, asparagine, arginine and cysteine, or a polypeptide having 2 to 40, preferably 2 to 20, particularly preferably 2 to 10, amino acids, where the amino acids are preferably polar amino acids, particularly preferably chosen from the group consisting of glycine, alanine, serine, threonine, glutamic acid, glutamine, aspartic acid, asparagine, arginine and cysteine, or a polyacrylic acid radical having 2-100, preferably 2-80, particularly preferably 2-50, most preferably 2-20, monomer units, or
for increasing the lipophilicity the “module” is an alkyl radical having 2-40 carbon atoms or polyolefin radical having 2 to 40, preferably 2 to 20, particularly preferably 2 to 10, repeat units, or an amino acid, preferably chosen from the group consisting of glycine, valine, leucine, isoleucine, phenylalanine, tryptophan, proline, methionine, or a polypeptide having 2 to 40, preferably 2 to 20, particularly preferably 2 to 10, amino acids, where the amino acids are preferably nonpolar amino acids, particularly preferably chosen from the group consisting of glycine, valine, leucine, isoleucine, phenylalanine, tryptophan, proline, methionine, or a polyester, polyamide or polyurethane having 2-100, preferably 2-80, particularly preferably 2-50, most preferably 2-20 monomer units and Y is a functional group from hydroxy or amino groups.

[0204] In a further preferred embodiment, coupling of the linker molecule (iii) with the effector molecule (i) (e.g. reactive dye as described above) is a carbodiimide-, anhydride- or acid chloride-mediated esterification reaction or amide formation, where the use of the acid chloride of the linker molecule (iii) is particularly preferred. Carbodiimide-, anhydride- or acid chloride-mediated reaction means the activation of the carboxyl group of the linker molecule (iii) required for the formation of an ester or amide between linker molecule (iii) and effector molecule (i).

[0205] Carbodiimides to be mentioned are preferably dicyclohexylcarbodiimide (DCC), diisopropylcarbodiimide (DIC), N′-(3-dimethylaminopropyl)-N-ethylcarbodiimide hydrochloride (EDC), where the use of diisopropylcarbodiimide or EDC are particularly preferred. In addition, it is possible to carry out an activation with carbonyldiimidazole (CDI). These esterifications are carried out in the presence of 0.1-100 mol % of N,N-dimethylaminopyridine (DMAP), preferably 0.5-10%, particularly preferably 1-6%. The formation of amides can take place by reacting the compound activated with carbodiimide with the amine. Optionally, the amide formation can be carried out in the presence of additives, such as, for example, N-hydroxysuccinimide, pentafluorophenol or N-hydroxybenzotriazole. Such additives are known to the person skilled in the art. If active esters isolatable through these additives are obtained, the reactions of these isolated active esters with the effector molecules are also understood according to the invention as carbodiimide-mediated esterification.

[0206] The reaction of the linker molecule (iii) to give the anhydride takes place by general methods, as are known to the person skilled in the art. Preference is given to the use of mixed anhydrides, as are obtained, for example, by reaction with acetic anhydride, pivaloyl anhydride, acetyl chloride, pivaloyl chloride or chloroformic esters. Particular preference is given to pivaloyl anhydrides and to the anhydrides with carbonic acid. When using the acid chlorides, it is expedient to carry out the anhydride formation in the presence of a tertiary base, such as, for example, pyridine, triethylamine.

[0207] The coupling of the linker molecule (iii) with the effector molecule (i) described under (a) can preferably be carried out after the above-described activation of the linker molecule (iii) to give the anhydride in the presence of a base. Preferred bases to be mentioned are: aromatic and tertiary alkylamines, e.g. pyridine, triethylamine, tributylamine, trioctylamine, ethyldiisopropylamine etc. In a particularly preferred embodiment, the base used is triethylamine.

[0208] For the reaction of the linker molecule (iii) to the acid chloride, the chlorinating agents used are the customary chlorinating agents known to the person skilled in the art, for example thionyl chloride, phosphorus trichloride, phosphorus pentachloride, oxalyl chloride, phosgene, or phosphorus oxychloride. Very particular preference is given to the use of thionyl chloride (SOCl₂).

[0209] Using thionyl chloride, it is possible, for example, to convert maleimidocaproic acid into the acid chloride. Suitable solvents here are: aromatic and aliphatic hydrocarbons, e.g. benzene, toluene, xylenes, hexane, heptane, etc., halogenated hydrocarbons, e.g. methylene chloride, ethers, e.g. diethyl ether, THF etc., and an excess of the chlorinating agent itself. In a preferred embodiment, toluene is used.

[0210] The chlorination can be carried out with or without a catalyst. DMF is particularly preferred as catalyst for the chlorination.

[0211] Optionally, the reaction product from step (a) (referred to below as linker effector molecule (iv)) can be further purified to separate possible isomers of the reaction product. Here, all customary methods of purifying chemical substances can be used, e.g.: distillation, rectification, crystallization, extractions and chromatographic purification methods. Column chromatography is preferably carried out.

[0212] Besides the abovementioned reactive dyes, other dyes can also be coupled to a keratin-binding polypeptide by means of a linker and be used for the method according to the invention.

[0213] Here, particularly advantageous dyes are those specified in the list below. The Color Index Numbers (CIN) are taken from the Rowe Colour Index, 3rd edition, Society of Dyers and Colourists, Bradford, England, 1971.

TABLE 3
Advantageous dyes

| Chemical name or other name | CIN | Color |
|---|---|---|
| 2,4-Dinitrohydroxynaphthalene-7-sulfonic acid | 10316 | yellow |
| Pigment Yellow 1 | 11680 | yellow |
| Pigment Yellow 3 | 11710 | yellow |
| Pigment orange 1 | 11725 | orange |
| 2,4-Dihydroxyazobenzene | 11920 | orange |
| Solvent Red 3 | 12010 | red |
| 1-(2′-Chloro-4′-nitro-1′-phenylazo)-2-hydroxynaphthalene | 12085 | red |
| Pigment Red 3 | 12120 | red |
| Ceres Red; Sudan Red; Fat Red G | 12150 | red |
| Pigment Red 112 | 12370 | red |
| Pigment Red 7 | 12420 | red |
| Pigment Brown 1 | 12480 | brown |
| 4-(2′-Methoxy-5′-sulfodiethylamido-1′-phenylazo)-3-hydroxy-5″- | 12490 | red |
| chloro-2″,4″-dimethoxy-2-naphthanilide | | |
| Disperse Yellow 16 | 12700 | yellow |
| 1-(4-Sulfo-1-phenylazo)-4-aminobenzene-5-sulfonic acid | 13015 | yellow |
| 2,4-Dihydroxyazobenzene-4′-sulfonic acid | 14270 | orange |
| 2-(2,4-Dimethylphenylazo-5-sulfo)-1-hydroxynaphthalene-4-sulfonic acid | 14700 | red |
| 2-(4-Sulfo-1-naphthylazo)-1-naphthol-4-sulfonic acid | 14720 | red |
| 2-(6-Sulfo-2,4-xylylazo)-1-naphthol-5-sulfonic acid | 14815 | red |
| 1-(4′-Sulfophenylazo)-2-hydroxynaphthalene | 15510 | orange |
| 1-(2-Sulfo-4-chloro-5-carboxy-1-phenylazo)-2- | 15525 | red |
| hydroxynaphthalene | | |
| 1-(3-Methylphenylazo-4-sulfo)-2-hydroxynaphthalene | 15580 | red |
| 1-(4′,(8′)-Sulfonaphthylazo)-2-hydroxynaphthalene | 15620 | red |
| 2-Hydroxy-1,2′-azonaphthalene-1′-sulfonic acid | 15630 | red |
| 3-Hydroxy-4-phenylazo-2-naphthylcarboxylic acid | 15800 | red |
| 1-(2-Sulfo-4-methyl-1-phenylazo)-2-naphthylcarboxylic acid | 15850 | red |
| 1-(2-Sulfo-4-methyl-5-chloro-1-phenylazo)-2- | 15865 | red |
| hydroxynaphthalene-3-carboxylic acid | | |
| 1-(2-Sulfo-1-naphthylazo)-2-hydroxynaphthalene-3-carboxylic acid | 15880 | red |
| 1-(3-Sulfo-1-phenylazo)-2-naphthol-6-sulfonic acid | 15980 | orange |
| 1-(4-Sulfo-1-phenylazo)-2-naphthol-6-sulfonic acid | 15985 | yellow |
| Allura Red | 16035 | red |
| 1-(4-Sulfo-1-naphthylazo)-2-naphthol-3,6-disulfonic acid | 16185 | red |
| Acid orange 10 | 16230 | orange |
| 1-(4-Sulfo-1-naphthylazo)-2-naphthol-6,8-disulfonic acid | 16255 | red |
| 1-(4-Sulfo-1-naphthylazo)-2-naphthol-3,6,8-trisulfonic acid | 16290 | red |
| 8-Amino-2-phenylazo-1-naphthol-3,6-disulfonic acid | 17200 | red |
| Acid Red 1 | 18050 | red |
| Acid Red 155 | 18130 | red |
| Acid Yellow 121 | 18690 | yellow |
| Acid Red 180 | 18736 | red |
| Acid Yellow 11 | 18820 | yellow |
| Acid Yellow 17 | 18965 | yellow |
| 4-(4-Sulfo-1-phenylazo)-1-(4-sulfophenyl)-5- | 19140 | yellow |
| hydroxypyrazolone-3-carboxylic acid | | |
| Pigment Yellow 16 | 20040 | yellow |
| 2,6-(4′-Sulfo-2″,4″-dimethyl)bisphenylazo)-1,3-dihydroxybenzene | 20170 | orange |
| Acid Black 1 | 20470 | black |
| Pigment Yellow 13 | 21100 | yellow |
| Pigment Yellow 83 | 21108 | yellow |
| Solvent Yellow | 21230 | yellow |
| Acid Red 163 | 24790 | red |
| Acid Red 73 | 27290 | red |
| 2-[4′-(4″-Sulfo-1″-phenylazo)-7′-sulfo-1′-naphthylazo]-1-hydroxy- | 27755 | black |
| 7-aminonaphthalene-3,6-disulfonic acid | | |
| 4′-[(4″-Sulfo-1″-phenylazo)-7′-sulfo-1′-naphthylazo]-1-hydroxy-8- | 28440 | black |
| acetyl-aminonaphthalene-3,5-disulfonic acid | | |
| Direct orange 34, 39, 44, 46, 60 | 40215 | orange |
| Basic Violet 14 | 42510 | violet |
| Basic Violet 2 | 42520 | violet |
| 2-Hydroxy-3,6-disulfo-4,4′- | 44090 | green |
| bisdimethylaminonaphthofuchsonimmonium | | |
| 3-(2′-Methylphenylamino)-6-(2′-methyl-4′-sulfophenylamino)-9- | 45190 | violet |
| (2″-carboxyphenyl)xanthenium salt | | |
| Fluorescein | 45350:1 | yellow |
| Phenyl-2-oxyfluorone-2-carboxylic acid | 45350 | yellow |
| 4,5-Dibromofluorescein | 45370:1 | orange |
| 4,5-Dibromofluorescein | 45370 | orange |
| 2,4,5,7-Tetrabromofluorescein | 45380:1 | red |
| 2,4,5,7-Tetrabromofluorescein | 45380 | red |
| Solvent Dye | 45396 | orange |
| Acid Red 98 | 45405 | red |
| 3′,4′,5′,6′-Tetrachloro-2,4,5,7-tetrabromofluorescein | 45410:1 | red |
| 3′,4′,5′,6′-Tetrachloro-2,4,5,7-tetrabromofluorescein | 45410 | red |
| 4,5-Diiodofluorescein | 45425:1 | red |
| 4,5-Diiodofluorescein | 45425 | red |
| 2,4,5,7-Tetraiodofluorescein | 45430 | red |
| Quinophthalone | 47000 | yellow |
| Quinophthalonedisulfonic acid | 47005 | yellow |
| Acid Violet 50 | 50325 | violet |
| 1,2-Dioxyanthraquinone, calcium-aluminum complex | 58000 | red |
| 3-Oxypyrene-5,8,10-sulfonic acid | 59040 | green |
| 1-Hydroxy-4-N-phenylaminoanthraquinone | 60724 | violet |
| 1-Hydroxy-4-(4′-methylphenylamino)anthraquinone | 60725 | violet |
| Acid Violet 23 | 60730 | violet |
| 1,4-Di(4′-methylphenylamino)anthraquinone | 61565 | green |
| 1,4-Bis(o-sulfo-p-toluidino)anthraquinone | 61570 | green |
| Acid Blue 80 | 61585 | blue |
| Acid Blue 62 | 62045 | blue |
| N,N′-Dihydro-1,2,1′,2′-anthraquinone azine | 69800 | blue |
| Vat Blue 6; Pigment Blue 64 | 69825 | blue |
| Indigo | 73000 | blue |
| Indigo disulfonic acid | 73015 | blue |
| Quinacridone Violet 19 | 73900 | violet |
| Pigment Red 122 | 73915 | red |
| Keto and/or hydroxyl derivatives of caredane | 75135 | yellow |
| Guanine or pearlescent agent | 75170 | white |
| 1,7-Bis(4-hydroxy-3-methoxyphenyl)-1,6-heptadiene-3,5-dione | 75300 | yellow |
| Complex salt (Na, Al, Ca) of carminic acid | 75470 | red |
| 6,7-Dimethyl-9-(1′-D-ribityl)isoalloxazine, lactoflavin | | yellow |
| Capsanthin, capsorubin | | orange |
| Betanin | | red |
| Acid Red 195 | | red |

[0214] In a further preferred embodiment of the present invention, for the method according to the invention for coloring skin, hair or nails, keratin-binding effector molecules are used which comprise one of the dye molecules shown in Table 3 coupled via a linker described above.

[0215] The abovementioned dyes can also be used as effector molecules (i) to a skin- or nail-binding polypeptide sequence (ii) for the coloring of skin or nails e.g. in tattoos. Of particular suitability is the use of keratin-binding effector molecules comprising fluorescent dyes (e.g. the fluorescent dyes included in Table 3) to achieve a more healthy and luminous-looking skin shade and for optically lightening the skin (“skin whitening”) following application to the skin. The use of fluorescent pigments is described, for example, in U.S. Pat. No. 6,753,002. Fluorescent dyes for producing a healthier skin shade are described in “Filling the Fluorescent Palette, Cosmetics & Toiletries, 26-34, 121, No. 5, 2006”. Preference is given, for example, to fluorescent dyes from DayGlo. In addition, these keratin-binding effector molecules comprising fluorescent dyes can also be used for lightening hair and for producing special reflections or shimmers on the hair. This is described, for example in “Hair lightening by fluorescent dyes, Cosmetics & Toiletries, 56-57, 120, No. 7, 2005” and the specification US 2004/0258641 cited therein.

[0216] The binding of the reaction product arising from the above-described step (a) with the keratin-binding polypeptide (ii) takes place via the second still free anchor group of the linker molecule. For example, such an anchor group can be a thiol function, by means of which the linker can enter into a disulfide bond with a cysteine radical of the keratin-binding polypeptide (ii).

[0217] The use of tailored linkers allows the precise matching of the linking of the linker effector molecule to the keratin-binding polypeptide. Furthermore, it is possible as a result to link two or more effector molecules to a keratin-binding polypeptide (ii).

[0218] The linker used is governed by the functionality to be coupled. Of suitability are, for example, molecules which couple polypeptides (ii) to be keratin-bonded by means of sulfhydryl-reactive groups (e.g. maleimides, pyridyl disulfides, α-haloacetyls, vinylsulfones, sulfatoalkylsulfones (preferably sulfatoethylsulfones)).

[0219] Preference is given to a covalent linkage of the linker molecule (iii) with the keratin-binding polypeptide (ii). This can take place, for example, via the side chains of the keratin-binding polypeptide (ii), in particular via amino functions, hydroxy functions, carboxylate functions or thiol functions. Preference is given to a linkage via the amino functions of one or more lysine radicals, one or more thiol groups of cysteine radicals, one or more hydroxyl groups of serine, threonine or tyrosine radicals, one or more carboxyl groups of aspartic acid or glutamic acid radicals or via the N-terminal or C-terminal function of the keratin-binding polypeptide (ii). Apart from the amino acid functions occurring in the primary sequence of the keratin-binding polypeptide (ii), it is also possible to add amino acids with suitable functions (e.g. cysteines, lysines, aspartates, glutamates) to the sequence, or to substitute amino acids of the polypeptide sequence by such amino acid functions. Methods for the mutagenesis or manipulation of nucleic acid molecules are sufficiently known to the person skilled in the art. A few selected methods are described below.

[0220] Particular preference is given to the use of a linker effector molecule (iv) which has been prepared using the maleimidocaproic acid specified as being preferred for the method according to the invention. In the case of such a linker effector molecule (iv), the cysteine radicals present in the keratin-binding polypeptide are used for the coupling.

[0221] The success of the effector coupling can be monitored by means of three different tests:
[0222] (i) Ellmann test in which the number of free Cys-SH groups in the Protein can be determined before and after effector coupling. A considerable reduction in the free SH groups after coupling indicates good reaction progress (see Example 11).
[0223] (ii) Activity test in which the binding of the KBD-B (SEQ ID NO.: 166) with and without coupled effector to hair can be measured. Good reaction control should not reduce the activity of KBD-effector toward uncoupled KBD-B (SEQ ID No.: 166) (see Example 12)
[0224] (iii) Visible coloration of hair or skin as a result of the successful coupling of the dye onto the KBD-B (SEQ ID No.: 166) (see Example 14).

[0225] In a further embodiment according to the invention, the binding of the effector molecule takes place in such a way that they can be eliminated and released from the keratin-binding polypeptides (ii) in the sense of a “slow release” or “controlled release” as a result of the effect of endogenous enzymes (for example esterases, lipases or glucosidases) or as a result of the ambient conditions on the skin (e.g. moisture, acidic pH) over time. The keratin-binding polypeptides (ii) can thus be used as application system with which, through single or repeated application, small amounts of the free effector molecules on the skin can be achieved. In principle, it is known to the person skilled in the art that effectors can be released on the skin from their corresponding derivatives, for example from tocopherol acetate, ascorbyl palmitate or ascorbyl glucosides (exemplary literature: Redoulés, D. et al. J. Invest. Dermatol. 125, 2005, 270, Beijersbegen van Henegouwen, G. M. J. et al., J. Photochem. Photobiol. 29, 1995, 45.).

[0226] In a further preferred embodiment of the invention, for the method according to the invention, dyes carrying carboxyl, hydroxyl or amino groups are used. Here, the effector molecules used can have one or more carboxyl, hydroxyl or amino groups.

[0227] The present invention further provides the use of the above described keratin-binding effector molecules in cosmetic compositions suitable for coloring keratin fibers, preferably hair, skin or nails, particularly preferably human hair.

[0228] In another preferred embodiment, the use of the abovementioned keratin-binding effector molecules according to the invention is in compositions suitable for coloring hair in combination with cosmetically suitable auxiliaries and additives which are customarily used in hair colorants.

[0229] Here, the abovementioned dyes, preferably dyes approved for cosmetic purposes, can be used. These dyes are usually added in a concentration of from 0.001 to 1 percent by weight, preferably 0.01 to 0.9% by weight, particularly preferably 0.01 to 0.8% by weight or 0.01 to 0.7% by weight, very particularly preferably 0.01 to 0.6% by weight or 0.01 to 0.5% by weight, most preferably from 0.01 to 0.4% by weight or 0.01 to 0.3% by weight, based on the total weight of the composition. In a further embodiment, the compositions can comprise a keratin-binding effector molecule according to the invention in a concentration of from 1 to 10% by weight, preferably 2 to 8% by weight, 3 to 7% by weight, 4 to 6% by weight, based on the total weight of the composition. Moreover, the compositions can comprise a keratin-binding effector molecule according to the invention in a concentration of from 10 to 20% by weight, preferably 11 to 19% by weight, 12 to 18% by weight, 13 to 17% by weight, 14 to 16% by weight based on the total weight of the composition.

[0230] In order to ensure that the active ingredients of the hair-coloring compositions remain on the hair for a certain time following application and do not get into places where they are undesired, such as, for example, the face, the compositions should have a certain minimum viscosity. This viscosity is usually achieved through the use of thickeners, which are thus a further constituent of most hair colorants.

[0231] The thickeners used are usually crosslinked polyacrylic acids (e.g. Carbopol®), hydroxyethylcellulose, waxes and particularly mixtures of nonionic surfactants with a certain HLB value (hydrophobic lipophilic balance), anionic, cationic or nonionic association polymers. The use of ampholytic copolymers as thickeners for cosmetic compositions is known. Polymers are referred to as ampholytic or amphoteric if they have both anionogenic/anionic groups and cationogenic/cationic groups. Amphoteric polymers with an adequate number of dissociatable groups are water-soluble or water-dispersible and have found diverse uses in the pharmacy and cosmetics sector.

[0232] Suitable thickeners or polymers are described in the patent applications WO 00/039176, WO 04/058837, EP-A-0 982 021, WO 01/62809, WO 05/004821, DE 202 07 896 U1 and WO 02/000181.

[0233] To establish certain properties, the preparations can additionally also comprise conditioning substances based on silicone compounds. Suitable silicone compounds are, for example, polyalkylsiloxanes, polyarylsiloxanes, polyarylalkylsiloxanes, polyether siloxanes, silicone resins or dimethicone copolyols (CTFA) and amino functional silicone compounds, such as amodimethicones (CTFA).

[0234] Propellants are the propellants customarily used for hair sprays or aerosol foams. Preference is given to mixtures of propane/butane, pentane, dimethyl ether, 1,1-difluoroethane (HFC-152 a), carbon dioxide, nitrogen or compressed air.

[0235] Emulsifiers which can be used are all emulsifiers customarily used in hair foams. Suitable emulsifiers may be nonionic, cationic or anionic or amphoteric. Examples of nonionic emulsifiers (INCI nomenclature) are laureths, e.g. laureth-4; ceteths, e.g. ceteth-1, polyethylene glycol cetyl ether, ceteareths, e.g. ceteareth-25, polyglycol fatty acid glycerides, hydroxylated lecithin, lactyl esters of fatty acids, alkyl polyglycosides.

[0236] Examples of cationic emulsifiers are cetyidimethyl-2-hydroxyethylammonium dihydrogenphosphate, cetyltrimonium chloride, cetyltrimonium bromide, cocotrimonium methyl sulfate, quaternium-1 to x (INCI).

[0237] Anionic emulsifiers can be chosen, for example, from the group of alkyl sulfates, alkyl ether sulfates, alkylsulfonates, alkylarylsulfonates, alkyl succinates, alkyl sulfosuccinates, N-alkoyl sarcosinates, acyl taurates, acyl isethionates, alkyl phosphates, alkyl ether phosphates, alkyl ether carboxylates, alpha-olefinsulfonates, in particular the alkali metal and alkaline earth metal salts, e.g. sodium, potassium, magnesium, calcium, and ammonium and triethanolamine salts. The alkyl ether sulfates, alkyl ether phosphates and alkyl ether carboxylates can have between 1 and 10 ethylene oxide or propylene oxide units, preferably 1 to 3 ethylene oxide units, in the molecule.

[0238] Gel formers which can be used are all gel formers customary in cosmetics. These include slightly crosslinked polyacrylic acid, for example Carbomer (INCI), cellulose derivatives, e.g. hydroxypropylcellulose, hydroxyethylcellulose, cationically modified celluloses, polysaccharides, e.g. xanthan gum, caprylic/capric triglyceride, sodium acrylate copolymers, polyquaternium-32 (and) paraffinum liquidum (INCI), sodium acrylate copolymers (and) paraffinum liquidum (and) PPG-1 trideceth-6, acrylamidopropyltrimonium chloride/acrylamide copolymers, steareth-10 allyl ether, acrylate copolymers, polyquaternium-37 (and) paraffinum liquidum (and) PPG-1 trideceth-6, polyquaternium 37 (and) propylene glycol dicaprate dicaprylate (and) PPG-1 trideceth-6, polyquaternium-7, polyquaternium-44.

[0239] In the shampoo formulations, all of the anionic, neutral, amphoteric or cationic surfactants customarily used in shampoos can be used.

[0240] Suitable anionic surfactants are, for example, alkyl sulfates, alkyl ether sulfates, alkylsulfonates, alkylarylsulfonates, alkyl succinates, alkyl sulfosuccinates, N-alkoyl sarcosinates, acyl taurates, acyl isothionates, alkyl phosphates, alkyl ether phosphates, alkyl ether carboxylates, alpha-olefinsulfonates, in particular the alkali metal and alkaline earth metal salts, e.g. sodium, potassium, magnesium, calcium, and ammonium and triethanolamine salts. The alkyl ether sulfates, alkyl ether phosphates and alkyl ether carboxylates can have between 1 and 10 ethylene oxide or propylene oxide units, preferably 1 to 3 ethylene oxide units, in the molecule.

[0241] Of suitability are, for example, sodium lauryl sulfate, ammonium lauryl sulfate, sodium lauryl ether sulfate, ammonium lauryl ether sulfate, sodium lauroyl sarcosinate, sodium oleyl succinate, ammonium lauryl sulfosuccinate, sodium dodecylbenzenesulfonate, trmethanolamine dodecylbenzenesulfonate.

[0242] Suitable amphoteric surfactants are, for example, alkylbetaines, alkylamidopropylbetaines, alkylsulfobetaines, alkyl glycinates, alkyl carboxyglycinates, alkyl amphoacetates or -propionates, alkyl amphodiacetates or -dipropionates.

[0243] For example, cocodimethylsulfopropylbetaine, laurylbetaine, cocamidopropylbetaine or sodium cocamphopropionate can be used.

[0244] Suitable nonionic surfactants are, for example, the reaction products of aliphatic alcohols or alkylphenols having 6 to 20 carbon atoms in the alkyl chain, which may be linear or branched, with ethylene oxide and/or propylene oxide. The amount of alkylene oxide is about 6 to 60 mol per mole of alcohol. In addition, alkylamine oxides, mono- or dialkylalkanolamides, fatty acid esters of polyethylene glycols, alkyl polyglycosides or sorbitan ether esters are suitable.

[0245] Furthermore, the shampoo formulations can comprise customary cationic surfactants, such as, for example, quaternary ammonium compounds, for example cetyltrimethylammonium chloride.

[0246] In the shampoo formulations, in order to achieve certain effects, customary conditioning agents can be used in combination with the keratin-binding effector molecules according to the invention.

[0247] These include, for example, the abovementioned cationic polymers with the INCI name Polyquaternium, in particular copolymers of vinylpyrrolidone/N-vinylimidazolium salts (Luviquat FC, Luviquat&commat, HM, Luviquat MS, Luviquat Care), copolymers of N-vinylpyrrolidone/dimethylaminoethyl methacrylate, quaternized with diethyl sulfate (Luviquat D PQ 11), copolymers of N-vinylcaprolactam/N-vinylpyrrolidone/N-vinylimidazolium salts (Luviquat D Hold), cationic cellulose derivatives (Polyquaternium-4 and -10), acrylamide copolymers (Polyquaternium-7). In addition, Protein hydrolyzates can be used, and also conditioning substances based on silicone compounds, for example polyalkylsiloxanes, polyarylsiloxanes, polyarylalkylsiloxanes, polyether siloxanes or silicone resins. Further suitable silicone compounds are dimethicone copolyols (CTFA) and amino-functional silicone compounds, such as amodimethicones (CTFA). In addition, cationic guar derivatives, such as Guar Hydroxypropyltrimonium Chloride (INCI) can be used.

[0248] As a rule, the hair cosmetic or skin cosmetic preparation is used for application to the skin (topical) or hair. Topical preparations are understood here as meaning those preparations which are suitable for applying the active ingredients to the skin or the hair in a fine distribution. Of suitability for this purpose are, for example, aqueous and aqueous-alcoholic solutions, sprays, foams, foam aerosols, ointments, aqueous gels, emulsions of the O/W or W/O type, microemulsions or cosmetic stick preparations.

[0249] According to a preferred embodiment of the cosmetic composition according to the invention, the composition comprises a carrier. A preferred carrier is water, a gas, a water based liquid, an oil, a gel, an emulsion or microemulsion, a dispersion or a mixture thereof. The specified carriers exhibit good skin compatibility. Of particular advantage for topical preparations are aqueous gets, emulsions or microemulsions.

[0250] Emulsifiers which can be used are nonionogenic surfactants, zwitterionic surfactants, ampholytic surfactants or anionic emulsifiers. The emulsifiers may be present in the composition according to the invention in amounts of from 0.1 to 10% by weight, preferably 1 to 5% by weight, based on the composition.

[0251] The nonionogenic surfactant used may, for example, be a surfactant from at least one of the following groups:

addition products of from 2 to 30 mol of ethylene oxide and/or 0 to 5 mol of propylene oxide onto linear fatty alcohols having 8 to 22 carbon atoms, onto fatty acids having 12 to 22 carbon atoms and onto alkylphenols having 8 to 15 carbon atoms in the alkyl group;
C_{12/18}-fatty acid mono- and diesters of addition products of from 1 to 30 mol of ethylene oxide onto glycerol; glycerol mono- and diesters and sorbitan mono- and diesters of saturated and unsaturated fatty acids having 6 to 22 carbon atoms and ethylene oxide addition products thereof; alkyl mono- and oligoglycosides having 8 to 22 carbon atoms in the alkyl radical and ethoxylated analogs thereof; addition products of from 15 to 60 mol of ethylene oxide onto castor oil and/or hydrogenated castor oil; polyol and, in particular polyglycerol esters, such as, for example, polyglycerol polyricinoleate, polyglycerol poly-12-hydroxystearate or polyglycerol dimerate. Likewise suitable are mixtures of compounds from two or more of these classes of substances;
addition products of from 2 to 15 mol of ethylene oxide onto castor oil and/or hydrogenated castor oil;
partial esters based on linear, branched, unsaturated or saturated C_{6/22} fatty acids, ricinoleic acid, and 12-hydroxystearic acid and glycerol, polyglycerol, pentaerythritol, dipentaerythritol, sugar alcohols (e.g. sorbitol), alkyl glucosides (e.g. methyl glucoside, butyl glucoside, lauryl glucoside), and polyglucosides (e.g. cellulose); mono-, di- and trialkyl phosphates, and mono-, di- and/or tri-PEG alkyl phosphates and salts thereof;
wool wax alcohols;
polysiloxane-polyalkyl polyether copolymers and corresponding derivatives;
mixed esters of pentaerythritol, fatty acids, citric acid and fatty alcohol as in German patent specification 1165574 and/or mixed esters of fatty acids having 6 to 22 carbon atoms, methylglucose and polyols, preferably glycerol or polyglycerol, and polyalkylene glycols.

[0252] In addition, zwitterionic surfactants can be used as emulsifiers. Zwitterionic surfactants is the term used to refer to those surface-active compounds which carry at least one quaternary ammonium group and at least one carboxylate group or a sulfonate group in the molecule. Particularly suitable zwitterionic surfactants are the so-called betaines, such as the N-alkyl-N,N-dimethylammonium glycinates, for example cocoalkyldimethylammonium glycinate, N-acylaminopropyl-N,N-dimethylammonium glycinates, for example cocoacylaminopropyldimethylammonium glycinate, and 2-alkyl-3-carboxylmethyl-3-hydroxyethylimidazolines having in each case 8 to 18 carbon atoms in the alkyl or acyl group, and cocoacylaminoethylhydroxyethyl carboxymethylglycinate. Particular preference is given to the fatty acid amide derivative known under the CTFA name Cocamidopropyl Betaine.

[0253] Likewise suitable emulsifiers are ampholytic surfactants. Ampholytic surfactants are understood as meaning those surface-active compounds which, apart from a C_{8,18}-alkyl or -acyl group in the molecule, comprise at least one free amino group and at least one —COOH— or —SO₃H group, and are capable of forming internal salts. Examples of suitable ampholytic surfactants are N-alkylglycines, N-alkylpropionic acids, N-alkylaminobutyric acids, N-alkyliminodipropionic acids, N-hydroxyethyl-N-alkylamidopropylglycines, N-alkyltaurtnes, N-alkylsarcosines, 2-alkylaminopropionic acids and alkylaminoacotic acids having in each case about 8 to 18 carbon atoms in the alkyl group.

[0254] Particularly preferred ampholytic surfactants are N-cocoalkylaminopropionate, cocoacylaminoethylaminopropionate and C_{12/18}-acylsarcosine. Besides the ampholytic emulsifiers, quaternary emulsifiers are also suitable, with those of the ester quat type, preferably methyl-quaternized difatty acid triethanolamine ester salts, being particularly preferred. Furthermore, anionic emulsifiers which may be used are alkyl ether sulfates, monoglyceride sulfates, fatty acid sulfates, sulfosuccinates and/or ether carboxylic acids.

[0255] Suitable oil bodies are Guerbet alcohols based on fatty alcohols having 6 to 18, preferably 8 to 10, carbon atoms, esters of linear C₆-C₂₂-fatty acids with linear C₅-C₂₂-fatty alcohols, esters of branched C₆-C₁₃-carboxylic acids with linear C₆-C₂₂-fatty alcohols, esters of linear C₆-C₂₂-fatty acids with branched alcohols, in particular 2-ethylhexanol, esters of linear and/or branched fatty acids with polyhydric alcohols (such as, for example, propylene glycol, dimerdiol or trimertriol) and/or Guerbet alcohols, triglycerides based on C₆-C₁₈-fatty acids, liquid mono-/di-, triglyceride mixtures based on C₆-C₁₈-fatty acids, esters of C₆-C₂₂-fatty alcohols and/or Guerbot alcohols with aromatic carboxylic acids, in particular benzoic acid, esters of C₂-C₁₂-dicarboxylic acids with linear or branched alcohols having 1 to 22 carbon atoms or polyols having 2 to 10 carbon atoms and 2 to 6 hydroxyl groups, vegetable oils, branched primary alcohols, substituted cyclohexanes, linear C₆-C₂₂-fatty alcohol carbonates, Guerbet carbonates, esters of benzoic acid with linear and/or branched C₆-C₂₂-alcohols (e.g. Finsolv® TN), dialkyl ethers, ring-opening products of epoxidized fatty acid esters with polyols, silicone oils and/or aliphatic or naphthenic hydrocarbons. Oil bodies which may be used are also silicone compounds, for example dimethylpolysiloxanes, methylphenylpolysiloxanes, cyclic silicones, and amino-, fatty-acid-, alcohol-, polyether-epoxy-, fluorine-, alkyl- and/or glycoside-modified silicone compounds, which may either be in the form of a liquid or in the form of a resin at room temperature. The oil bodies may be present in the compositions according to the invention in amounts of from 1 to 90% by weight, preferably 5 to 80% by weight, and in particular 10 to 50% by weight, based on the composition.

[0256] The list of specified ingredients which can be used together with the keratin-binding effector molecules according to the invention should of course not be regarded as being exhaustive or limiting. The ingredients can be used individually or in any combinations with one another.

[0257] In addition, the present invention relates to compositions suitable for coloring skin, nails and/or hair, preferably hair colorants, comprising at least one of the above described keratin-binding effector molecules according to the invention.

[0258] This invention further provides a method of coloring hair, skin and/or nails using the keratin-binding effector molecules according to the invention. In this method, preference is given to using keratin-binding effector molecules which comprise at least one of the abovementioned keratin-binding polypeptides (ii) and at least one dye or reactive dye according to Tables 3, 5 and 6.

[0259] Naturally, when producing the preparations suitable for coloring hair, keratin-binding effector molecules can also be mixed together with different dyes so that specific color nuances are achieved. Preparations with specific color nuances can be produced, for example, by
[0260] (a) mixing selected reactive dyes or dyes during the production of the keratin-binding effector molecule, or
[0261] (b) mixing individual keratin-binding effector molecules when creating the hair colorant.

[0262] In a particularly preferred embodiment of the method according to the invention, keratin-binding effector molecules are used comprising
[0263] (e) a keratin-binding polypeptide which comprises one of the sequences according to SEQ ID No.: 2, 4, 6, 8, 10, 12, 14, 16, 18, 20, 22, 24, 26, 28, 30, 32, 34, 36, 38, 40, 42, 44, 46, 48, 50, 52, 54, 56, 58, 60, 62, 64, 66, 68, 70, 72, 74, 76, 78, 80, 82, 84, 86, 88, 90, 92, 94, 96, 98, 100, 102, 104, 106, 108, 110, 112, 114, 116, 118, 120, 122, 124, 126, 128, 130, 132, 134, 136, 138, 140, 146, 150, 153, 156, 157, 158, 160, 162, 164, 166, 168 or 170, preferably in SEQ ID NO: 2, 4, 6, 8, 10, 12, 14, 40, 42, 44, 46, 48, 146, 150, 153, 156, 157, 158, 160, 162, 164, 166, 168 or 170, particularly preferably 166 and 168, most preferably 168, or correspond to a polypeptide which is at least 40%, 45% or 50%, preferably at least 55%, 60%, 65% or 70%, particularly preferably at least 75%, 80%, 85%, 90%, 91%, 92%, 93% or 94%, very particularly preferably at least 95% or 96%, identical to at least one of the sequences according to SEQ ID No.: 2, 4, 6, 8, 10, 12, 14, 16, 18, 20, 22, 24, 26, 28, 30, 32, 34, 36, 38, 40, 42, 44, 46, 48, 50, 52, 54, 56, 58, 60, 62, 64, 66, 68, 70, 72, 74, 76, 78, 80, 82, 84, 86, 88, 90, 92, 94, 96, 98, 100, 102, 104, 106, 108, 110, 112, 114, 116, 118, 120, 122, 124, 126, 128, 130, 132, 134, 136, 138, 140, 146, 150, 153, 156, 157, 158, 160, 162, 164, 166, 168 or 170, preferably in SEQ ID NO: 2, 4, 6, 8, 10, 12, 14, 40, 42, 44, 46, 48, 146, 150, 153, 156, 157, 158, 160, 162, 164, 166, 168 or 170, particularly preferably 166 and 168, most preferably 168, and is able to bind keratin,
[0264] (f) as linker molecule (iii), maleimidocaproic acid or a maleimidoalkanol, preferably maleimidopentanol, and
[0265] (g) an effector molecule (i) chosen from the dyes listed in Table 3, or
[0266] (h) a reactive dye chosen from Tables 6 or 7.

[0267] Preferably, the hair is colored by applying a preparation comprising the keratin-binding effector molecules according to the invention to the hair to be colored in an amount and time sufficient for producing the desired color change.

[0268] Here, a good coloring can be achieved with a suitable keratin-binding effector molecule after just a very short time (a few minutes) or at least within half an hour (see Example 20).

[0269] The person skilled in the art is aware that the amount and time required for the coloring depends on the length and number of hairs to be colored.

[0270] In a particularly preferred embodiment of the abovementioned method, it is a reversible coloring method in which the keratin-binding effector molecule can be removed from skin, hair or nails in a displacement reaction. For this, a rinse with keratin, for example, can be used, as a result of which the keratin-binding effector molecules are displaced from their existing bond to the keratin and are saturated with the keratin from the rinse. Alternatively, a rinse with a high fraction of detergent (e.g. SDS) for washing off is also possible. (see Example 20).

Sequences

| SEQ ID | Sequence | |
|---|---|---|
| NO.: | type | Sequence description |
| 1 | Nucleic acid | Homo sapiens Desmoplakin_Accession NM_004415 |
| 2 | Protein | Homo sapiens Desmoplakin_Accession NM 004415 |
| 3 | Nucleic acid | Homo sapiens Desmoplakin_Accession NM_004415 domain B |
| 4 | Protein | Homo sapiens Desmoplakin_Accession NM_004415 domain B |
| 5 | Nucleic acid | Homo sapiens Desmoplakin_Accession NM_004415 domain B-1 |
| 6 | Protein | Homo sapiens Desmoplakin_Accession NM_004415 domain B-1 |
| 7 | Nucleic acid | Homo sapiens Desmoplakin_Accession NM_004415 domain B-2 |
| 8 | Protein | Homo sapiens Desmoplakin_Accession NM_004415 domain B-2 |
| 9 | Nucleic acid | Homo sapiens Desmoplakin_Accession NM_004415 domain C |
| 10 | Protein | Homo sapiens Desmoplakin_Accession NM_004415 domain C |
| 11 | Nucleic acid | Homo sapiens Desmoplakin_Accession NM_004415 domain C-1 |
| 12 | Protein | Homo sapiens Desmoplakin_Accession NM_004415 domain C-1 |
| 13 | Nucleic acid | Homo sapiens Desmoplakin_Accession NM_004415 domain C-2 |
| 14 | Protein | Homo sapiens Desmoplakin_Accession NM_004415 domain C-2 |
| 15 | Nucleic acid | Homo sapiens_Filaggrin_Accession CAI19595 |
| 16 | Protein | Homo sapiens_Filaggrin_Accession CAI19596 |
| 17 | Nucleic acid | Homo sapiens plakophilin 1 Accession NM_001005337, transcript variant 1a |
| 18 | Protein | Homo sapiens plakophilin 1 Accession NM_001005337, transcript variant 1a |
| 19 | Nucleic acid | Homo sapiens plakophilin 1 Accession NM_000299, transcript variant 1b |
| 20 | Protein | Homo sapiens plakophilin 1 Accession NM_000299, transcript variant 1b |
| 21 | Nucleic acid | Mus musculus plakophilin 2 Accession NM_026163 NM_027894 |
| 22 | Protein | Mus musculus plakophilin 2 Accession NM_026163 NM_027895 |
| 23 | Nucleic acid | Mus musculus plakophilin 1 ACCESSION NM_019645 |
| 24 | Protein | Mus musculus plakophilin 1 ACCESSION NM_019646 |
| 25 | Nucleic acid | Bos taurus plakophilin 1 partial mRNA, Accession XM_868348 |
| 26 | Protein | Bos taurus plakophilin 1 partial mRNA, Accession XM_868349 |
| 27 | Nucleic acid | Canis familiaris similar to plakophilin 1 isoform 1a, Accession XM_851528 |
| 28 | Protein | Canis familiaris similar to plakophilin 1 isoform 1a, Accession XM_851529 |
| 29 | Nucleic acid | Danio rerio similar to Plakophilin 1 Accession XM_695832 |
| 30 | Protein | Danio rerio similar to Plakophilin 1 Accession XM_695833 |
| 31 | Nucleic acid | Rattus norvegicus similar to plakophilin 1, Accession XM_222666 |
| 32 | Protein | Rattus norvegicus similar to plakophilin 1, Accession XM_222667 |
| 33 | Nucleic acid | Pan troglodytes similar to Plakophilin 1, Accession XM_514091 |
| 34 | Protein | Pan troglodytes similar to Plakophilin 1, Accession XM_514092 |
| 35 | Nucleic acid | Gallus gallus similar to plakophilin 1, Accession XM_419240 |
| 36 | Protein | Gallus gallus similar to plakophilin 1, Accession XM_419241 |
| 37 | Nucleic acid | Xenopus laevis similar to plakophilin 4, Accession BI390496 |
| 38 | Protein | Xenopus laevis similar to plakophilin 4, Accession BI390497 |
| 39 | Nucleic acid | Homo sapiens desmoplakin, transcript variant 2, Accession NM_001008844 |
| 40 | Protein | Homo sapiens desmoplakin, transcript variant 2, Accession NM_001008845 |
| 41 | Nucleic acid | Mus musculus desmoplakin, Accession XM_621314 |
| 42 | Protein | Mus musculus desmoplakin, Accession XM_621315 |
| 43 | Nucleic acid | Rattus norvegicus similar to desmoplakin isoform II, Accession XM_225259 |
| 44 | Protein | Rattus norvegicus similar to desmoplakin isoform II, Accession XM_225260 |
| 45 | Nucleic acid | Pan troglodytes desmoplakin, Accession XM_518227 |
| 46 | Protein | Pan troglodytes desmoplakin, Accession XM_518228 |
| 47 | Nucleic acid | Gallus gallus similar to Desmoplakin, Accession XM_418957 |
| 48 | Protein | Gallus gallus similar to Desmoplakin, Accession XM_418958 |
| 49 | Nucleic acid | Homo sapiens junction plakoglobin (JUP), transcript variant 2, Accession |
| | | NM_021991 |
| 50 | Protein | Homo sapiens junction plakoglobin (JUP), transcript variant 2, Accession |
| | | NM_021992 |
| 51 | Nucleic acid | Mus musculus, plakoglobin; gamma-catenin, Accession NM_010593 |
| 52 | Protein | Mus musculus, plakoglobin; gamma-catenin, Accession NM_010594 |
| 53 | Nucleic acid | Rattus norvegicus gamma-catenin (plakoglobin), Accession NM_031047 |
| 54 | Protein | Rattus norvegicus gamma-catenin (plakoglobin), Accession NM_031048 |
| 55 | Nucleic acid | Danio rerio armadillo Protein family; plakoglobin, Accession NM_131177 |
| 56 | Protein | Danio rerio armadillo Protein family; plakoglobin, Accession NM_131178 |
| 57 | Nucleic acid | Xenopus tropicalis junction plakoglobin, Accession BC064717 |
| 58 | Protein | Xenopus tropicalis junction plakoglobin, Accession BC064718 |
| 59 | Nucleic acid | Canis familiaris similar to junction plakoglobin isoform 10, Accession |
| | | XM_856625 |
| 60 | Protein | Canis familiaris similar to junction plakoglobin isoform 10, Accession |
| | | XM_856626 |
| 61 | Nucleic acid | Xenopus laevis Jup Protein, Accession BC094116 |
| 62 | Protein | Xenopus laevis Jup Protein, Accession BC094117 |
| 63 | Nucleic acid | Bos taurus junction plakoglobin, Accession NM_001004024 |
| 64 | Protein | Bos taurus junction plakoglobin, Accession NM_001004025 |
| 65 | Nucleic acid | Sus scrofa plakoglobin, Accession NM_214323 |
| 66 | Protein | Sus scrofa plakoglobin, Accession NM_214324 |
| 67 | Nucleic acid | Danio rerio junction plakoglobin, Accession BC058305 |
| 68 | Protein | Danio rerio junction plakoglobin, Accession BC058306 |
| 69 | Nucleic acid | Saccharomyces cerevisiae, plakoglobin/armadillo/beta-catenin, Accession |
| | | AF005267 |
| 70 | Protein | Saccharomyces cerevisiae, plakoglobin/armadillo/beta-catenin, Accession |
| | | AF005268 |
| 71 | Nucleic acid | Homo sapiens plectin 1, intermediate filament binding Protein, Accession |
| | | NM_201380 |
| 72 | Protein | Homo sapiens plectin 1, intermediate filament binding Protein, Accession |
| | | NM_201381 |
| 73 | Nucleic acid | Mus musculus plectin 1 (Plec1), transcript variant 11, mRNA, Accession |
| | | NM_201394 XM |
| 74 | Protein | Mus musculus plectin 1 (Plec1), transcript variant 11, mRNA, Accession |
| | | NM_201394 XM |
| 75 | Nucleic acid | Bos taurus similar to plectin 1 isoform 1 (LOC510991), Accession XM_588232 |
| 76 | Protein | Bos taurus similar to plectin 1 isoform 1 (LOC510991), Accession XM_588233 |
| 77 | Nucleic acid | Canis familiaris similar to plectin 1 isoform, Accession XM_539204 |
| 78 | Protein | Canis familiaris similar to plectin 1 isoform, Accession XM_539205 |
| 79 | Nucleic acid | Trypanosoma cruzi, plectin-like Protein, Accession XM_809849 |
| 80 | Protein | Trypanosoma cruzi, plectin-like Protein, Accession XM_809850 |
| 81 | Nucleic acid | Rattus norvegicus plectin, Accession X59601 |
| 82 | Protein | Rattus norvegicus plectin, Accession X59602 |
| 83 | Nucleic acid | Cricetulus griseus plectin, Accession AF260753 |
| 84 | Protein | Cricetulus griseus plectin, Accession AF260754 |
| 85 | Nucleic acid | Homo sapiens periplakin, Accession NM_002705 |
| 86 | Protein | Homo sapiens periplakin, Accession NM_002706 |
| 87 | Nucleic acid | Mus musculus periplakin, Accession NM_008909 XM_358905 |
| 88 | Protein | Mus musculus periplakin, Accession NM_008909 XM_358906 |
| 89 | Nucleic acid | Homo sapiens envoplakin, Accession NM_001988 |
| 90 | Protein | Homo sapiens envoplakin, Accession NM_001989 |
| 91 | Nucleic acid | Mus musculus envoplakin, Accession NM_025276 XM_283024 |
| 92 | Protein | Mus musculus envoplakin, Accession NM_025276 XM_283025 |
| 93 | Nucleic acid | Bos taurus similar to Envoplakin, Accession XM_587641 |
| 94 | Protein | Bos taurus similar to Envoplakin, Accession XM_587642 |
| 95 | Nucleic acid | Canis familiaris similar to Envoplakin, Accession XM_540443 |
| 96 | Protein | Canis familiaris similar to Envoplakin, Accession XM_540444 |
| 97 | Nucleic acid | Danio rerio similar to Envoplakin, Accession XM_687958 |
| 98 | Protein | Danio rerio similar to Envoplakin, Accession XM_687959 |
| 99 | Nucleic acid | Rattus norvegicus, similar to envoplakin, db_xref GeneID: 303687 |
| 100 | Protein | Rattus norvegicus, similar to envoplakin, db_xref GeneID: 303688 |
| 101 | Nucleic acid | Pan troglodytes similar to Envoplakin, Accession XM_511692 |
| 102 | Protein | Pan troglodytes similar to Envoplakin, Accession XM_511693 |
| 103 | Nucleic acid | Human bullous pemphigoid antigen, Accession M63618 |
| 104 | Protein | Human bullous pemphigoid antigen, Accession M63619 |
| 105 | Nucleic acid | Mus musculus bullous pemphigoid antigen 1 (Bpag1), Accession AF396877 |
| 106 | Protein | Mus musculus bullous pemphigoid antigen 1 (Bpag1), Accession AF396878 |
| 107 | Nucleic acid | Mus musculus trichohyalin-like 1, Accession NM_027762 |
| 108 | Protein | Mus musculus trichohyalin-like 1, Accession NM_027763 |
| 109 | Nucleic acid | Bos taurus similar to trichohyalin-like 1, Accession XM_597026 |
| 110 | Protein | Bos taurus similar to trichohyalin-like 1, Accession XM_597027 |
| 111 | Nucleic acid | Homo sapiens trichohyalin-like 1, Accession NM_001008536 XM_060104 |
| 112 | Protein | Homo sapiens trichohyalin-like 1, Accession NM_001008536 XM_060105 |
| 113 | Nucleic acid | Strongylocentrotus purpuratus similar to Trichohyalin, Accession XM_793822 |
| 114 | Protein | Strongylocentrotus purpuratus similar to Trichohyalin, Accession XM_793823 |
| 115 | Nucleic acid | Trypanosoma cruzi trichohyalin, putative, Accession XM_809758 |
| 116 | Protein | Trypanosoma cruzi trichohyalin, putative, Accession XM_809759 |
| 117 | Nucleic acid | Giardia lamblia ATCC 50803 trichohyalin, Accession XM_765825 |
| 118 | Protein | Giardia lamblia ATCC 50803 trichohyalin, Accession XM_765826 |
| 119 | Nucleic acid | Aspergillus fumigatus Af293, trichohyalin, Accession XM_748643 |
| 120 | Protein | Aspergillus fumigatus Af293, trichohyalin, Accession XM_748644 |
| 121 | Nucleic acid | O. cuniculus trichohyalin, Accession Z19092 |
| 122 | Protein | O. cuniculus trichohyalin, Accession Z19093 |
| 123 | Nucleic acid | Pan troglodytes similar to Trichohyalin, Accession XM_526770 |
| 124 | Protein | Pan troglodytes similar to Trichohyalin, Accession XM_526771 |
| 125 | Nucleic acid | Human trichohyalin (TRHY), Accession L09190 |
| 126 | Protein | Human trichohyalin (TRHY), Accession L09191 |
| 127 | Nucleic acid | Mus musculus small proline-rich Protein 3, Accession NM_011478 |
| 128 | Protein | Mus musculus small proline-rich Protein 3, Accession NM_011479 |
| 129 | Nucleic acid | Homo sapiens small proline-rich Protein 2B (SPRR2B), Accession |
| | | NM_001017418 |
| 130 | Protein | Homo sapiens small proline-rich Protein 2B (SPRR2B), Accession |
| | | NM_001017419 |
| 131 | Nucleic acid | Mus musculus hair follicle Protein AHF, Accession XM_485271 |
| 132 | Protein | Mus musculus hair follicle Protein AHF, Accession XM_485272 |
| 133 | Nucleic acid | Homo sapiens epiplakin 1 (EPPK1), Accession NM_031308 XM_372063 |
| 134 | Protein | Homo sapiens epiplakin 1 (EPPK1), Accession NM_031308 XM_372064 |
| 135 | Nucleic acid | Mus musculus epiplakin 1, Accession NM_144848 NM_173025 |
| 136 | Protein | Mus musculus epiplakin 1, Accession NM_144848 NM_173026 |
| 137 | Nucleic acid | Mus musculus structural Protein FBF1, Accession AF241249 |
| 138 | Protein | Mus musculus structural Protein FBF1, Accession AF241250 |
| 139 | Nucleic acid | Streptococcus mutans spaP gene for antigen I/II, Accession X17390 |
| 140 | Protein | Streptococcus mutans spaP gene for antigen I/II, Accession X17391 |
| 141 | Nucleic acid | Sequence of the PCR primer Bag 43 |
| 142 | Nucleic acid | Sequence of the PCR primer Bag 44 |
| 143 | Nucleic acid | Sequence of the PCR primer Bag 53 |
| 144 | Nucleic acid | Sequence of the PCR primer Bag 51 |
| 145 | Nucleic acid | DNA fragment which has been amplified by means of the PCR primer Lib148 |
| | | (SEQ ID No.: 147) and Lib149 (SEQ ID No.: 148) |
| 146 | Protein | Translation product of the nucleic acid molecule SEQ ID No.: 145 |
| 147 | Nucleic acid | Sequence of the PCR primer Lib148 |
| 148 | Nucleic acid | Sequence of the PCR primer Lib149 |
| 149 | Nucleic acid | DNA fragment which has been amplified by means of the PCR primer Lib149 |
| | | (SEQ ID NO.: 148) and Lib150 (SEQ ID NO.: 151). |
| 150 | Protein | Translation product of the nucleic acid molecule SEQ ID No.: 149 |
| 151 | Nucleic acid | Sequence of the PCR primer Lib150 |
| 152 | Nucleic acid | DNA fragment which has been amplified by means of the PCR primer Lib151 |
| | | (SEQ ID No.: 156) and Lib152 (SEQ ID No.: 157) |
| 153 | Protein | Translation product of the nucleic acid molecule SEQ ID No.: 152 |
| 154 | Nucleic acid | Sequence of the PCR primer Lib151 |
| 155 | Nucleic acid | Sequence of the PCR primer Lib152 |
| 156 | Protein | KBD-B_3_Homo sapiens Desmoplakin_Accession NM_004415 domain B-3 |
| 157 | Protein | KBD-B_4 Homo sapiens Desmoplakin_Accession NM_004415 domain B-4 |
| 158 | Protein | KBD-B_5 Homo sapiens Desmoplakin_Accession NM_004415 domain B-5 |
| 159 | Nucleic acid | KBD-B_6 Homo sapiens Desmoplakin_Accession NM_004415 domain B-5 |
| 160 | Protein | KBD-B_6 Homo sapiens Desmoplakin_Accession NM_004415 domain B-5 |
| 161 | Nucleic acid | Homo sapiens trichoplein, BC004285 |
| 162 | Protein | Homo sapiens trichoplein, BC004285 |
| 163 | Nucleic acid | Homo sapiens Desmoplakin_Accession NM_004415 with nucleic acid exchanges |
| | | at positions around 2715, 8000 and 8000 compared to SEQ ID No.: ID 1 |
| 164 | Protein | Homo sapiens Desmoplakin_Accession NM_004415 with amino acid exchanges |
| | | at positions 905, 2687 and 2688 compared to SEQ ID No.: ID 2 |
| 165 | Nucleic acid | KBD-B_7 Homo sapiens Desmoplakin_Accession NM_004415 domain B-7 |
| 166 | Protein | KBD-B_7 Homo sapiens Desmoplakin_Accession NM_004415 domain B-7 |
| 167 | Nucleic acid | KBD-D with N-terminal histidine anchor, H. sapiens plakophilin 1a Accession |
| | | NM_001005337 |
| 168 | Protein | KBD-D with N-terminal histidine anchor, H. sapiens plakophilin 1a Accession |
| | | NP_001005337 |
| 169 | Nucleic acid | KBD-D amino acids 1-273 with C-terminal histidine anchor, H. sapiens plakophilin |
| | | 1a Accession NM_001005337 |
| 170 | Protein | BD-D amino acids 1-273 with C-terminal histidine anchor, H. sapiens plakophilin |
| | | 1a Accession NP_001005337 |
| 171 | Nucleic acid | Sequence of the PCR primer HRe6 |
| 172 | Nucleic acid | Sequence of the PCR primer HRe9 |
| 173 | Nucleic acid | Sequence of the PCR primer HRe7 |
| 174 | Nucleic acid | Sequence of the PCR primer HRe8 |
| 175 | Nucleic acid | Sequence of the PCR primer HRe26 |
| 176 | Nucleic acid | Sequence of the PCR primer HRe27 |

### EXPERIMENTAL EXAMPLES

[0271] The following examples are disclosed in order to illustrate preferred embodiments of the present invention. These examples are not to be regarded as being exhaustive or limiting the subject matter of the invention.

[0272] In the experimental description, the following abbreviations are used:

(2-amino-2-methylpropanol) AMP, (degrees Celsius) ° C., (ethylenediaminetetraacetic acid) EDTA, (1,1-difluoroethane) HFC 152, (international Nomenclature of Cosmetic Ingredients) INCI, (milliliters) ml, (minutes) min, (oil/water) O/W, (polyethylene glycol) PEG-25, (paraminobenzoic acid) PABA, (parts per million) ppm, (quantum satis) q.s., (vinylpyrrolidone) VP, (water/oil) W/O, (active ingredient) Al, (polyvinylpyrrolidone) PVP, keratin-binding domain (KBD), keratin-binding domain B of human desmoplakin (KBD-B), keratin-binding domain C of human desmoplakin (KBD-C).

### Example 1

### Expression Vectors and Production Strains

[0273] Various expression vectors were tested for the expression of the keratin-binding domains (KBD). For this, various promoters were used (e.g. IPTG-inducible, rhamnose-inducible, arabindose-inducible, methanol-inducible, constitutive promoters, etc.). Constructs were likewise tested in which the KBD were expressed as fusion Proteins (e.g. as fusion with thioredoxin, or eGFP, or YaaD [B. subtilis, SWISS-PROT: P37527, PDX1], etc.). Here, both the described KBD-B (keratin-binding domain B, SEQ ID No.: 4), and KBD-C (keratin-binding domain C, SEQ ID No.: 10), and the combination of the two domains KBD-BC were expressed using the various expression systems. The vector constructs mentioned are nonlimiting for the claim.

[0274] Given by way of representation as an example is the vector map of the IPTG-inducible vector pQE30-KBD-B (FIG. 1), of the methanol-inducible vectors pLib15 (FIG. 2) and pLib16 (FIG. 3), and of the inducible vector pLib19 (FIG. 4). The procedure for KBD-C may also be analogous to the described vector constructions and expressions.

[0275] For the expression of the KBD, various production hosts were used, such as, for example, E. coli strains (see Ex. 2; e.g. XL10-Gold [Stratagene], BL21-CodonPlus [Stratagene], and others). However, other bacterial production hosts, such as, for example, Bacillus megaterium or Bacillus subtilis, were also used. In the case of the KBD expression in B. megaterium, the procedure was carried out analogously to: Barg, H., Malten, M. & Jahn, D. (2005). Protein and vitamin production in Bacillus megaterium. In Methods in Biotechnology-Microbial Products and Biotransformations (Barredo, J.-L., ed, 205-224).

[0276] The fungal production strains used were Pichia pastoris (see Ex. 3; e.g. GS115 and KM71 [both from Invitrogen]; and others) and Aspergillus nidulans (see Ex. 4; e.g. RMS011 [Stringer, M A, Dean, R A, Sewall, T C, Timberlake, W E (1991) Rodletless, a new Aspergillus developmental mutant induced by direct gene activation. Genes Dev 5:1161-1171] und SRF200 [Karos, M, Fischer, R (1999) Molecular characterization of HymA, an evolutionarily highly conserved and highly expressed Protein of Aspergillus nidulans. Mol Genet Genomics 260:510-521], and others). However, it is also possible to use other fungal production hosts, such as, for example, Aspergillus niger (KBD expression analogous to EP 0635574A1 and/or WO 98/46772) for the KBD expression.

### Example 2

### KBD Expression in E. coli Strains with IPTG Inducible Promoters, e.g. by the Expression Plasmid pQE30-KBD-B

[0277] For the expression, various production hosts were used, such as, for example, various E. coli strains (e.g. XL10-Gold [Stratagene], BL21-CodonPlus [Stratagene], and others), Bacillus megaterium, Bacillus subtilis etc.

[0278] Described here—by way of representation as an example—is the cloning and expression of KBD-B by E. coli, transformed with pQE30-KBD-B:

Cloning of pQE30-KBD-B
[0279] Lambda-MaxiDNA (DNA-Lambda Maxi Kit, Qiagen) was prepared from a cDNA bank of human keratinocytes (BD Bioscience, Clontech, Human Keratinocyte cDNA, foreskin, primary culture in log phase, vector λgt11)
[0280] The PCR was carried out using the following oligonucleotides:

| | |
|---|---|
| Bag 43 | |
| (5′-GGTCAGTTACGTGCAGCTGAAGG-3′) | (SEQ ID No.: 141) |
| and | |
| Bag 44 | |
| (5′ GCTGAGGCTGCCGGATCG-3′) | (SEQ ID No.: 142) |

### 50 μl PCR Mixture:

| | | |
|---|---|---|
| 10x PCR buffer Pfu Ultra High Fidelity: | 5 | μl |
| Lambda DNA (744 ng/μl) | 1 | μl (1:30 dilution) |
| dNTP's.-Mix (10 mM) | 1 | μl |
| Oligo Bag 43 (192 ng/μl) | 0.5 | μl |
| Oligo Bag 44 (181 ng/μl) | 0.5 | μl |
| Pfu Ultra High Fidelity Polymerase | 1 | μl |
| H₂O | 41 | μl |

### Temperature Program:

[0282]

$$30 \times \{ \begin{matrix}2 min & - 95 ° C . \\ 30 sec & - 95 ° C . \\ 30 sec & - Gradient 50 ° C , . -> 60 ° C . \\ 2 min 30 sec & - 72 ° C . \\ 10 min & - 72 ° C .\end{matrix}$$

[0283] The resulting PCR product about 1102 bp in size was cut out of an agarose gel and purified.
[0284] Using the purified PCR product as template, a 2nd PCR was then carried out:
[0285] Oligonucleotides used:

(SEQ ID No.: 143)

| | |
|---|---|
| Bag 53: | (5′-CGCGCCTCGAGCCACATACTGGTCTGC-3′) |
| and | |

(SEQ ID No.: 144)

| | |
|---|---|
| Bag 51 | (5′-GCTTAGCTGAGGCTGCCGGATCG-3′) |

### 50 μl PCR Mixture:

| | | |
|---|---|---|
| 10x PCR buffer TAQ: | 5 | μl |
| Template from above PCR | 3.5 | μl |
| dNTP's.-Mix (10 mM) | 1 | μl |
| Oligo Bag 53 (345 ng/μl) | 0.5 | μl |
| Oligo Bag 51 (157 ng/μl) | 0.5 | μl |
| TAQ Polymerase | 1 | μl |
| H₂O | 39 | μl |

### Temperature Program:

[0287]

$$30 \times \{ \begin{matrix}2 min & - 95 ° C . \\ 30 sec & - 95 ° C . \\ 30 sec & - 58 ° C . \\ 3 min & - 72 ° C . \\ 10 min & - 72 ° C .\end{matrix}$$

[0288] The resulting PCR product about 1073 bp in size was cut out of an agarose gel, purified and cloned in the following vector: pCR2.1-TOPO (Invitrogen).
[0289] The resulting vector pCR2.1-TOPO+KBD-B (5027 bp) was then transformed, amplified in E. coli, then cleaved with XhoI and EcoRI and the resulting KBD-B fragment was cloned in pBAD/HisA (Invitrogen; likewise cleaved with XhoI and EcoRI).
[0290] The newly formed vector pBAD/HisA+KBD-B (5171 bp) was again cleaved with SacI and StuI and the resulting KBD-B fragment was cloned in pQE30 (Qiagen; cleaved with SacI and SmaI). The resulting expression vector pQE30-KBD-B (4321 bp; see also FIG. 1) was used for the following KBD-B expressions.

[0291] The KBD-B (SEQ ID No.: 4) expressed by the vector pQE30-KBD-B in E. coli additionally included, on the N-terminus, the amino acids MRGSHHHHHHGSACEL, and, on the C-terminus, the amino acids CVDLQPSLIS (SEQ ID No.: 166).

Expression of KBD-B by pQE30-KBD-B in E. coli
[0292] Precultures were inoculated from plate or glycerol culture with pQE30-KBD-B transformed E. coli strains (e.g. XL10-Gold [Stratagene]) Depending on the size of the main culture, inoculation with LB medium (about 1-100) was carried out in a tube or a small flask.
[0293] Antibiotics were used according to the strain used (for pQE30-KBD-B ampicillin 100 μg/ml).
[0294] Incubation was carried out at 250 rpm and 37° C.
[0295] The main culture was inoculated about 1:100 with preculture, main culture: LB medium or suitable minimal medium with the respective antibiotics. Incubation at 250 rpm and 37° C.
[0296] Induction was carried out with 1 mM IPTG above an OD (600 nm) of 0.5.
[0297] After induction for 4 h, the cells were centrifuged off.

[0298] In fermenters the procedure was analogous, although it was possible to carry out induction at much higher OD units and thus to considerably increase the cell and Protein yield.

### Example 3

### Intracellular and Secretory Expression of KBD by Means of Pichia pastoris Strains Using Methanol-Inducible Promoters, e.g. Through the Expression Plasmids pLib 15 and pLib 16 (Shaking Flask)

[0299] For the KBD expression, various Pichia pastoris strains were used, such as, for example, GS115 and KM71 (Pichia Expression Kit, Version M; Invitrogen Life Technologies).

[0300] Described here is—by way of representation as an example—the expression of KBD-B by P. pastoris, transformed with pLib15 (intracellular expression, vector see FIG. 6) or pLib16 (secretory expression, vector see FIG. 7).

[0301] For the construction of pLib15, a KBD-B-encoding DNA fragment (SEQ ID No.: 145) 948 bp in size was amplified by means of PCR using the oligonucleotides Lib148
[0302] (5′-GCTAAGGAATTCACCATGCATCACCATCACCATCACGAGCCACATACTGGTC TGCT-3′ (SEQ ID No.: 147)) and Lib149
[0303] (5′-GCTGGAGAATTCTCAGCTAATTAAGCTTGGCTGCA-3′ (SEQ ID No.: 148)), and the vector pQE30-KBD-B (Example 2, FIG. 5) as templates. Here, EcoRI restriction sites were introduced at both ends of the PCR products.
[0304] For the construction of pLib16, a KBD-B-encoding DNA fragment (SEQ ID No.: 149) 942 bp in size was amplified by means of PCR using the oligonucleotides Lib149 (5′-GCTGGAGAATTCTCAGCTAATTAAGCTTGGCTGCA-3′ (SEQ ID No.: 148)) and Lib150 (5′-GCTAAGGAATTCCATCACCATCACCATCACGAGCCACATACTGGTCTGCT-3′ (SEQ ID No.: 151)) and the vector pQE30-KBD-B (Example 2, FIG. 5) as templates. Here, EcoRI restriction sites were introduced at both ends of the PCR products.
[0305] The PCR was carried out in 50 μl reaction mixtures which had the following composition:
[0306] 1 μl plasmid-DNA pQE30-KBD-B
[0307] 1 μl dNTP-Mix (each 10 mM; Eppendorf)
[0308] 5 μl 10×PCR buffer+MgCl₂ (Roche)
[0309] 1 μl Lib148 or Lib150 5′ primer (corresponds to 50 pmol)
[0310] 1 μl Lib149 3′ primer (corresponds to 50 μmol)
[0311] 5 U Pwo polymerase (Roche)
[0312] The PCR reactions were carried out under the following cycle conditions:
[0313] Step 1: 5 minutes at 95° C. (denaturation)
[0314] Step 2: 45 seconds at 95° C.
[0315] Step 3: 45 seconds at 50° C. (annealing)
[0316] Step 4: 2 minutes at 72° C. (elongation)
[0317] 30 cycles of steps 2-4
[0318] Step 5: 10 minutes at 72° C. (post-elongation)
[0319] Step 6: 4° C. (pause)
[0320] The PCR product which was amplified with the oligonucleotides Lib148/Lib149 (SEQ ID No.: 145) was digested with EcoRI and ligated into the EcoRI-cleaved vector pPIC3.5 (Pichia Expression Kit, Version M, Invitrogen). The correct KBD-B amplification was checked by sequencing the vector pLib15 (FIG. 6) resulting from the ligation.
[0321] The PCR product which was amplified with the oligonucleotides Lib149/Lib150 (SEQ ID No.; 149) was digested with EcoRI and ligated into the EcoRI-cleaved vector pPIC9 (Pichia Expression Kit, Version M, Invitrogen). The correct KBD-B amplification was checked by sequencing the vector pLib16 (FIG. 7) resulting from the ligation.
[0322] Electrocompetent cells and spheroplasts of the P. pastoris strains were transformed with the circular and StuI-linearized vectors pLib15 and pLib16 according to the manufacturer's instructions (Pichia Expression Kit, Version M, Invitrogen).
[0323] The transformants were analyzed by means of PCR and Southern Blot using chromosomal DNA.
[0324] For the proculture, KBD-expressing P. pastoris transformants were inoculated from plate or glycerol culture. Depending on the size of the main culture, inoculation with MGY, BMG or BMGY medium (Pichia-Expression-Kit, Version M, Invitrogen) (about 1:100) was carried out in a tube or a small flask.
[0325] The culture was incubated at 250-300 rpm and 30° C. until OD₆₀₀=2-6.
[0326] The cells were harvested with 1500-3000×g for 5 min at room temperature
[0327] For the main culture, the harvested cell pellet was taken up at an OD₆₀₀=1 in methanol-comprising mM, BMM or BMMY medium (Pichia-Expression-Kit, Version M, Invitrogen) in order to induce the expression.
[0328] The main culture was incubated at 250-300 rpm and 30° C. for 1-96 h.
[0329] The induction was maintained every 24 h by adding 100% methanol at a methanol end concentration of 0.5%.
[0330] In the case of intracellular expression, the harvesting and disruption of the cells was carried out after the end of the main culture by means of a Menton-Gaulin.
[0331] In the case of secretory expression, the culture supernatant was collected and the KBD-B was purified from it directly.
[0332] The KBD-B expressed intracellularly in P. pastoris (SEQ ID No.: 145) (pLib15) included, besides the polypeptide sequence SEQ ID No.: 4, additionally, at the N-terminus, the amino acids MHHHHHH, and, at the C terminus, the amino acids GVDLQPSLIS.
[0333] The KBD-B expressed secretorily in P. pastoris (SEQ ID No.: 149) (pLib16) included, prior to processing, besides the polypeptide sequence SEQ ID No.: 4, additionally at the N-terminus the amino acids MRFPSIFTAVLFAASSALAAPVNTTTEDETAOIPAEAVIGYSDLPGDFDVAVLPFS NSTNNGLLFINTTIASIAAKEEGVSLEKREAEAYVEFHHHHHH, and, at the C-terminus, the amino acids GVDLQPSLIS.
[0334] The KBD-B processed and secreted by means of P. pastoris (SEQ ID No.: 149) (pLib16) included, besides the polypeptide sequence SEQ ID No.: 4, additionally at the N-terminus the amino acids YVEFHHHHHH, and at the C-terminus the amino acids GVDLQPSLIS.

### Example 4

### Expression of KBD by Means of Aspergillus nidulans Strains Using the Inducible alcA Promoter, e.g. Through the Expression Plasmid pLib 19 (Shaking Flask)

[0335] For the expression, A. nidulans wild type strains were used, such as, for example, RMS011 or SRF200. Described here is—by way of representation as an example—the expression of KBD-B by A. nidulans, transformed with pLib19 (FIG. 8).
[0336] For the construction of pLib19, a KBD-B-encoding DNA fragment 922 bp in size (SEQ ID No.: 152) was amplified by means of PCR using the oligonucleotides Lib151
[0337] (5′-CACCATGCATCACCATCACCATCACGAGCCACATACTGGTCTGCT-3′ (SEQ ID No. 154)) and Lib152 (5′-GCTAATTAAGCTTGGCTGCA-3′ (SEQ ID No.: 155)), and the vector pQE30-KBD-B (Example 2, FIG. 5) as template (using the abovementioned PCR conditions, with the annealing temperature of the PCR program of 53° C. being adapted to the Tm values of the primers Lib151 and Lib152). The PCR product was ligated into the vector pENTRID (pENTR™ Directional TOPO® Cloning Kit, Version E, Invitrogen). The correct KBD-B amplification was checked by sequencing.
[0338] The recombination of the KBD-B encoding DNA fragment was carried out into the vector pMT-OvE (Toews M W, Warmbold J, Konzack S, Rischitor P, Veith D, Vienken K, Vinuesa C, Wei H, Fischer R; Establishment of mRFP1 as a fluorescent marker in Aspergillus nidulans and construction of expression vectors for high-throughput Protein tagging using recombination in vitro (GATEWAY). (2004) Curr Genet. 45: 383-389) using the “Gateway® LR Clonase™ enzyme mix” (Invitrogen). This produced the vector pLib19 (FIG. 8).
[0339] Protoplasts of the A. nidulans wild type strains were transformed with the circular vector pLib19 (Yelton M M, Hamer J E, Timberlake W E; Transformation of Aspergillus nidulans by using a trpC plasmid., (1984) Proc Natl Acad Sci USA 81: 1479-1474). The transformants were analyzed by means of PCR and Southern Blot using chromosomal DNA.
[0340] For the preculture of KBD-B-expressing A. nidulans transformants, 100 ml of minimal medium (0.6% NaNO₃; 0.152% KH₂PO₄_{^{−}}, 0.052% KCl [pH 6.5]; 0.8% glucose; 0.05% MgSO₄; 1 ml trace element solution [1 g/l FeSO₄33 7H₂O; 8.8 g/l ZnSO₄×7H₂O; 0.4 g/l CuSO₄×5H₂O; 0.15 g/l MnSO₄×4H₂O; 0.1 g/l Na₂B₄O₇×10H₂O; 0.05 g/l (NH₄)₆Mo₇O₂₄×4H₂O], +strain-specific supplements) or 100 ml of complete medium (2% malt extract; 0.1% peptone; 2% glucose; +strain-specific supplements) were inoculated in 500 ml flasks with 10⁶-10⁷ spores and incubated for 16-24 h at 200-250 rpm and 37° C.
[0341] After the preculture, the fungal mycelium was harvested by filtration, washed with distilled water and transferred to flasks with 100-500 ml of fresh minimal medium. In this main culture medium, 0.1% fructose was used instead of glucose as the C-source. To induce the KBD expression, ethanol (1% final concentration) or glycerol (50 mM) or sodium acetate (50 mM) or ethylamine or threonine were additionally added to the medium. The additives mentioned for inducing the expression are not limiting for the claim. The main culture was incubated for a further 5-48 h at 200-250 rpm and 37° C.
[0342] After the end of the culture, the fungal mycelium was harvested with 1500-3000×g for 5 min at room temperature and disrupted by means of a Menton-Gaulin.
[0343] Besides the polypeptide sequence SEQ ID No. 4, the KBD-B expressed in A. nidulans (SEQ ID No.: 152) (pLib19) additionally included, at the N-terminus, the amino acids MHHHHHH, and, at the C-terminus, the amino acids GVDLQPSLISKGGRADPAFLYKVVMIRLLTKPERKLLEGGPGTQLLFPLVRVNCA LGVIMVIAVSCVKLLSAHNSTQHTSRKHKV.

### Example 5

### Cell Disruption and Inclusion Body Purification (pQE30-KBD-B)

[0344] Solubly expressed KBD could be used directly following cell disruption (e.g. by means of Menton-Gaulin) or be purified by means of chromatography (see Example 6). Insolubly expressed KBD (e.g. in inclusion bodies) was purified as follows:
[0345] The fermenter contents were centrifuged, the pellet was suspended in 20 mM phosphate buffer pH=7.5 and disrupted by means of a Menton-Gaulin.
[0346] The disrupted cells were centrifuged again (15 000 g), the pellet from this was treated with 20 mM phosphate, 500 mM NaCl and 8 M urea and so stirred. (Dissolution of the Inclusion Bodies)
[0347] The pH of the supernatant was adjusted to 7.5.
[0348] Centrifugation was then carried out again and the supernatant was applied to an Ni chelate Sepharose column and purified as described in Example 6.

### Example 6

### Purification of Keratin-Binding Domain B on Ni Chelate Sepharose

[0349] The KBD could be purified chromatographically through the attached His tag over an Ni column.

Column material: Ni-Sepharose High Performance
[0350] Amersham Biosciences order No.: 17-5268-02

[0351] The material was packed into a column (e.g. diameter 2.6 cm, height 10 cm) and equilibrated with buffer A+4% buffer B (corresponds to 20 mM imidazole).

[0352] The Protein extract (see e.g. cell disruption and inclusion body purification) was applied to the column at pH 7.5 using a Superloop (ÄKTA system) (flow about 5 ml/min).

[0353] Following application, washing was carried out with buffer A+20 mM imidazole. Elution was carried out with buffer B (500 mM imidazole in buffer A).

[0354] The eluate was collected in fractions using a fraction collector.

[0355] The eluate was then freed from salt (advantageous for samples which are to be concentrated). For this, the eluate was freed from salt, for example, over a Sephadex G25 medium column (Amersham). Then, for the concentration, for example an Amicon chamber (stirred ultrafiltration cell, Millipore) could.

### Buffer A:

[0356] 20 mM sodium dihydrogenphosphate
[0357] 500 mM NaCl (if desired, it is also possible to use buffer with lower NaCl concentrations)
[0358] 8 M urea (urea does not need to be used if “active” KBD is chromatographed which has already been solubly expressed.
   [0359] Without urea, no subsequent renaturation of the Protein is required.)
[0360] pH=7.50

### Buffer B:

[0361] 20 mM sodium dihydrogenphosphate
[0362] 500 mM NaCl (if desired, it is also possible to use buffers with lower NaCl concentrations)
[0363] 8 M urea
[0364] 500 mM imidazole
[0365] pH=7.50

### Example 7

### Renaturation of Keratin-Binding Domain B

[0366] Insolubly expressed keratin-binding domain (e.g. from inclusion bodies) can be renatured and thus activated as follows:

### Method 1: Discontinuous Dialysis

[0367] 6.5 ml of Cellytc IB (Sigma, order No. C5236) and 5 mM DTT were added to 6.5 ml of KBD-B inclusion bodies in 8 M urea (Ni chelate eluate, HiTrap). The solution to be renatured was then poured into a dialysis tube (Spectrum: Spectra Por MWCO: 12-14 kD).

[0368] Carry out dialysis for about 12 hours against 1 l 6 M urea solution at 4° C. with careful stirring.

[0369] 500 ml of 25 mM Tris/HCl pH=7.50 were added and dialysis was carried out like this for 9 hours at 4° C. Subsequent addition of a further 250 ml of the Tris buffer (see above) and dialysis for a further 12 hours.

[0370] 500 ml of 25 mM Tris/HCl pH=7.50 were then added again and dialysis was carried out like this for 9 hours at 4° C. Subsequent addition of a further 250 ml of the Tris buffer (see above) and dialysis for a further 12 hours.

[0371] 500 ml of 25 mM Tris/HCl pH=7.50 were then added again and dialysis was carried out like this for 9 hours at 4° C. The dialysis tube containing the dialyzate was then placed into 2 l: 25 mM Tris+150 mM NaCl pH=7.50. Dialysis was then carried out again at 4° C. for 12 hours.

[0372] The contents of the dialysis tube were then removed.

### Method 2: Continuous Dialysis

[0373] 20 ml of KBD-B inclusion bodies in 8 M urea (Ni chelate eluate, HiTrap) were treated with 10 ml of Cellytic IB (Sigma, order No. C5236) and 5 mM DTT. The solution was then poured into a dialysis chamber: Slide-A-Lyzer Dialyses Cassette PIERCE, MWCO: 10 kD. Order No.: 66830.

[0374] Dialysis was then carried out for about 1 hour against 1 l 6 M urea solution at 4° C.

[0375] Then, over a period of 48 h, 2 l of the following buffer were metered in continuously by means of a peristaltic pump: 25 mM Tris/HCl pH=7.5.

[0376] The dialysis tube containing the dialyzate was then added to 2 l of the end buffer:

[0377] 25 mM Tris+150 mM NaCl pH=7.50 and dialysis was carried out for about 12 hours at 4° C.

[0378] The contents of the dialysis tube were then removed.

### Example 8

### Binding to Skin 1 (Qualitative)

[0379] A visual qualitative test was developed in order to examine whether KBD binds to skin.

### Solutions Used:

[0380] Blocking solution: Western Blocking Reagent 1921673 Roche (10× solution) diluted in TBS.

### TBS: 20 mM Tris; 150 mM NaCl pH 7.5

### TTBS: TBS+0.05% Tween20

[0381] The first step is the transfer of the outer keratin layer of the skin to a stable support. For this purpose, a transparent adhesive tape was firmly applied to depilated human skin and removed again. The test can be carried out directly on the transparent adhesive tape, or the adhering keratin layer can be transferred to a glass slide through renewed adhesion. Binding was demonstrated as follows:
[0382] For incubation with the various reagents, transfer to a Falcon vessel
[0383] If appropriate addition of ethanol for degreasing, removal of ethanol and drying of the slide
[0384] Incubation with blocking buffer for 1 h at room temperature
[0385] 2× washing for 5 min with TTBS
[0386] 1× washing for 5 min with TBS
[0387] Incubation with the KBD to be tested (coupled to tag—e.g. His₆, HA etc.) or control Protein in TBS/0.05% Tween 20 for 2-4 h at room temperature
[0388] Removal of the supernatant
[0389] 3× washing with TBS
[0390] Incubation for 1 h at room temperature with monoclonal anti-polyHistidine (or specific KBD rabbit) antibodies, diluted 1:2000 in TBS+0.01% blocking
[0391] 2× washing for 5 min with TTBS
[0392] 1× washing for 5 min with TBS
[0393] Incubation for 1 h at room temperature with anti-mouse IgG alkaline-phosphatase conjugate, diluted 1:5000 in TBS+0.01% blocking
[0394] 2× washing for 5 min with TTBS
[0395] 1× washing for 5 min with TBS
[0396] Addition of phosphatase substrate (NBT-BCIP; Boehringer MA 1 tablet/40 ml of water 2.5 min; stop: with water)
[0397] Optical detection of the colored precipitate with the naked eye or using a microscope. A blue colored precipitate indicates that KBD has bound to the skin.

### Example 9

### Binding to Skin 2 (Quantitative)

[0398] A quantitative test was developed with which the hair/skin binding strength of the KBD can be compared with nonspecific Proteins.

[0399] A 5 mm cork borer was used to bore a section out of a thawed dry piece of skin without hair (human or pig) (or in the case of a surface test a section of skin is inserted into a Falcon lid). The sample of skin was then converted to a thickness of 2-3 mm in order to remove any tissue present. The skin sample was then transferred to an Eppendorf vessel (Protein low-bind) in order to carry out the binding demonstration (see also FIG. 9; alternatively, the Episkin system [reconstituted human skin] from L'Oreal can also be used):
[0400] 2× washing with PBS/0.05% Tween 20
[0401] Addition of 1 ml of 1% BSA in PBS and incubation for 1 h at room temperature, gentle swinging movements (900 rpm).
[0402] Removal of the supernatant
[0403] Addition of 100 μg of KBD in PBS with 0.05% Tween 20; incubation for 2 h at room temperature and gentle swinging movements (900 rpm).
[0404] Removal of the supernatant
[0405] 3× washing with PBS/0.05% Tween 20
[0406] Incubation with 1 ml of monoclonal mouse anti-tag (His6 or HA or specific KBD) antibodies with peroxidase conjugate (1:2000 in PBS with 0.05% Tween 20) [Monoclonal AntipolyHistidine Peroxidase Conjugate, produced in mouse, lyophilized powder, Sigma] for 2-4 h at room temperature, gentle swinging movement (900 rpm)
[0407] 3× washing with PBS/0.05% Tween 20
[0408] Addition of peroxidase substrate (1 ml/Eppendorf vessel; composition see below)
[0409] Allow reaction to run until blue coloration (about 90 seconds).
[0410] Stop the reaction with 100 μl of 2 M H₂SO₄.
[0411] The absorption was measured at 405 nm.

### Peroxidase Substrate (Prepare Shortly Beforehand):

[0412] 0.1 ml TMB solution (42 mM TMB in DMSO)
+10 ml substrate buffer (0.1 M sodium acetate pH 4.9)
+14.7 μl H₂O₂ 3% strength

### Example 10

### Binding to Hair (Quantitative)

[0413] In order to be able to demonstrate the binding strength of KBD to hair also relative to other Proteins, a quantitative assay was developed (see also FIG. 9). In this test, hair was firstly incubated with KBD and excess KBD was washed off. An antibody-peroxidase conjugate was then coupled via the His tag of the KBD. Nonbound antibody-peroxidase conjugate was washed off again. The bound antibody-peroxidase conjugate [Monoclonal AntipolyHistidine Peroxidase Conjugate, produced in mouse, lyophilized powder, Sigma] can convert a colorless substrate (TMB) into a colored product, which can be measured photometrically at 405 nm. The intensity of the absorption indicates the amount of bound KBD or comparison Protein. The comparison Protein chosen was, for example, YaaD from B. subtilis, which likewise had—as is necessary for this test—a His tag for the detection. Instead of the His tag, other specific antibodies conjugated with peroxidase can also be used.

[0414] 5 mg of hair (human) are cut into sections 5 mm in length and transferred to Eppendorf vessels (Protein low-bind) in order to carry out the binding demonstration:
[0415] Addition of 1 ml of ethanol for degreasing
[0416] Centrifugation, removal of ethanol and washing of the hair with H₂O
[0417] Addition of 1 ml of 1% BSA in PBS and incubation for 1 h at room temperature, gentle swinging movements.
[0418] Centrifugation, removal of the supernatant
[0419] Addition of the keratin-binding domains to be tested (coupled to tag—e.g. His₆, HA etc.) or control Protein in 1 ml of PBS/0.05% Tween 20; incubation for 16 h at 4° C. (or at least 2 h at room temperature) with gentle swinging movements.
[0420] Centrifugation, removal of the supernatant
[0421] 3× washing with PBS/0.05% Tween 20
[0422] Incubation with 1 ml monoclonal mouse anti-tag (His6 or HA) antibodies with peroxidase conjugate (1:2000 in PBS/0.05% Tween 20) [Monoclonal AntipolyHistidine Peroxidase Conjugate, produced in mouse, lyophilized powder, Sigma] for 2-4 h at room temperature, gentle swinging movement
[0423] 3× washing with PBS/0.05% Tween 20
[0424] Addition of peroxidase substrate (1 ml/Eppendorf vessel)
[0425] Allow reaction to run until blue coloration (about 2 minutes).
[0426] Stop the reaction with 100 μl of 2 M H₂SO₄.
[0427] The absorption is measured at 405 nm.

### Peroxidase Substrate (Prepare Shortly Beforehand):

[0428] 0.1 ml TMB solution (42 mM TMB in DMSO)
+10 ml substrate buffer (0.1 M sodium acetate pH 4.9)
+14.7 μl H₂O₂ 3% strength
BSA=bovine serum albumin
PBS=phosphate buffered salt solution
Tween 20=polyoxyethylene sorbitan monolaureate, n about 20
TMB=3,5,3′,5′-tetramethylbenzidine

[0429] A binding test on hair carried out by way of example for KBD-B demonstrated considerable superiority of the binding of KBD-B (SEQ ID No.: 166) to hair compared with significantly poorer binding of the comparison Protein YaaD:

TABLE 4
Quantitative KBD activity test Hair: 1) buffer; 2) comparison Protein
YaaD; 3) KBD-B denatured; 4) KBD-B renatured. The table shows
the measured absorption values at 405 nm.

| | | |
|---|---|---|
| 1 | Buffer | A_{405 nm} = 0.000 |
| 2 | Comparison Protein YaaD | A_{405 nm} = 0.088 |
| 3 | KBD-B denatured | A_{405 nm} = 0.254 |
| 4 | KBD-B renatured | A_{405 nm} = 1.591 |

### Example 11

### Expression of KBD-D (SEQ ID No.: 167) by Means of Escherichia coli Strains Using the Expression Plasmid pRee024 with an IPTG Inducible Promoter (FIG. 8)

[0430] For the expression, the E. coli strain XL 10 Gold [Stratagene] was used.

[0431] Described here, by way of representation as an example, is the cloning of KBD-D (SEQ ID No.: 167) and the subsequent expression of the KBD-D Protein (SEQ ID No.:168) in E. coli, transformed with pRee024 (FIG. 8):

Cloning of pRee024:
[0432] Lambda-MaxiDNA (DNA-Lambda Maxi Kit, Qiagen) was prepared from a cDNA bank of human keratinocytes (BD Bioscience, Clontech, Human Keratinocyte cDNA, foreskin, primary culture in log phase, vector: λgt11).

[0433] The PCR for the amplification of the KBD-D gene was carried out in two steps. Firstly, the 5′ end and 3′ end were amplified independently. These fragments were the matrix for the amplification of the entire KBD-D gene.

[0434] The PCR for the amplification of the 5′ end was carried out as follows:

[0435] The primers had the following sequence:

(SEQ ID No.: 171)

| | |
|---|---|
| HRe6: | 5′-ATGAACCACTCGCCGCTCAAGACCGCCTTG-3′ |

(SEQ ID No.: 172)

| | |
|---|---|
| HRe9: | 5′-CGTTCCCGGTTCTCCTCAGGAGGCTGACTG-3′ |

### 100 μl PCR Mixture:

| | | |
|---|---|---|
| 10x PCR buffer Pfu Ultra High Fidelity: | 10 | μl |
| Lambda DNA (744 ng/μl) | 1 | μl (1:10 dilution) |
| dNTP's.-Mix (10 mM) | 10 | μl |
| HRe6 (196 ng/μl) | 1 | μl |
| HRe9 (201 ng/μl) | 1 | μl |
| Pfu Ultra High Fidelity Polymerase | 1 | μl |
| H₂O bidistilled | 76 | μl |

### Temperature Program:

[0437]

$$30 \times \{ \begin{matrix}2 min & 95 ° C . \\ 30 sec & 95 ° C . \\ 30 sec & 63 ° C . \\ 1 min 30 sec & 72 ° C .\end{matrix}$$

[0438] A fragment approximately 1 kb in size was detected in the agarose gel. The reaction was purified and used below as 5′ end template for the amplification of the KBD-D gene.

[0439] The PCR for the amplification of the 3′ end was carried out as follows:

[0440] The primers had the following sequence:

(SEQ ID No.: 173)

| | |
|---|---|
| HReY: | 5′-TTAGAATCGGGAGGTGAAGTTCCTGAGGCT-3′ |

(SEQ ID No.: 174)

| | |
|---|---|
| HReB: | 5′-CACCACCAACAAGCTGGAGACCCGGAG-3′ |

### 100 μl PCR Mixture:

| | | |
|---|---|---|
| 10x PCR buffer Pfu Ultra High Fidelity: | 10 | μl |
| Lambda DNA (744 ng/μl) | 1 | μl (1:10 dilution) |
| dNTP's.-Mix (10 mM) | 10 | μl |
| HRe7 (201 ng/μl) | 1 | μl |
| HRe8 (209 ng/μl) | 1 | μl |
| Pfu Ultra High Fidelity Polymerase | 1 | μl |
| H₂O bidistilled | 76 | μl |

### Temperature Program:

[0442]

$$30 \times \{ \begin{matrix}2 min & 95 ° C . \\ 30 sec & 95 ° C . \\ 30 sec & 63 ° C . \\ 1 min 30 sec & 72 ° C .\end{matrix}$$

[0443] A fragment approximately 1.2 kb in size was detected in the agarose gel. The reaction was purified and used below as 3′ end template for the amplification of the KBD-D gene.
[0444] For the amplification of the KBD-D gene, the 5′ end template and the 3′ end template were used as matrix. The PCR was carried out as follows;

### 100 μl PCR Mixture:

| | | |
|---|---|---|
| 10x PCR buffer Pfu Ultra High Fidelity: | 10 | μl |
| dNTP-mix (10 mM) | 10 | μl |
| H₂O bidistilled | 75 | μl |
| 5′ end template | 1 | μl |
| 3′ end template | 1 | μl |
| Pfu Ultra High Fidelity Polymerase | 1 | μl |
| H₂O | 76 | μl |

### Temperature Program:

[0446]

$$10 \times \{ \begin{matrix}60 sec & 94 ° C . \\ 300 sec & 72 ° C .\end{matrix}$$

after the 10 cycles, 1 μl of primer HRe6 (196 μg/ml) and HRe7 (206 μg/ml) and 1 μl of Pfu Ultra High Fidelity Polymerase were added and the following temperature program was carried out with the reaction:

### Temperature Program:

[0447]

$$30 \times \{ \begin{matrix}2 min & 95 ° C . \\ 30 sec & 95 ° C . \\ 30 sec & 63 ° C . \\ 1 min 30 sec & 72 ° C .\end{matrix}$$

[0448] Then, 1 μl of Taq polymerase was added and the mixture was incubated for 10 minutes at 72° C.
[0449] The resulting PCR product approximately 2150 bp in size was cut out of an agarose gel, purified and cloned in the following vector: pCR2.1-TOPO (Invitrogen).
[0450] The resulting vector pRee019 (6112 bp) was then transformed, amplified in E. coli, and the KBD-D gene was checked by a sequencing.

[0451] Subsequently, the KBD-D gene was cloned into the expression vector. For this, a further PCR was carried out with the vector pRee019 as template:

### Oligonucleotides Used:

HRe26:

(SEQ ID No.: 175)

5′-CTCGGTACCAACCACTCGCCGCTCAAGACCGCCTTGGCG-3′
HRe27:

(SEQ ID No.: 176)

5′-ATTAAGCTTTTAGAATCGGGAGGTGAAGTTCCTGAGGCT-3′

### 100 μl PCR Mixture:

| | | |
|---|---|---|
| 10x PCR buffer Pfu Ultra High Fidelity: | 10 | μl |
| pRee019 (25 ng/μl) | 1 | μl |
| dNTP's.-Mix (10 mM) | 10 | μl |
| HRe26 (287 ng/μl) | 1 | μl |
| HRe27 (354 ng/μl) | 1 | μl |
| Pfu Ultra High Fidelity Polymerase | 1 | μl |
| H₂O bidistilled | 76 | μl |

### Temperature Program:

[0454]

$$30 \times \{ \begin{matrix}2 min & 95 ° C . \\ 30 sec & 95 ° C . \\ 30 sec & 79 ° C . \\ 1 min 30 sec & 72 ° C .\end{matrix}$$

[0455] A fragment approximately 2.2 kb in size was detected in the agarose gel. The reaction was purified and then cut with the restriction endonucleases KpnI and HindIII; the resulting fragment was cloned into the expression vector. This gave the vector pRee024, which was used subsequently for the KBD-D expression.
   Expression of KBD-D (SEQ ID No.: 167) by pRee024 in E. coli
[0456] Precultures were inoculated from plate or glycerol culture with pRee024 transformed E. coli strains (e.g. TG10). Depending on the size of the main culture, inoculation with LB medium (about 1:100) was carried out in a tube or a small flask.
[0457] Antibiotics were used according to the strain used (for E. coli transformed with pRee024 TG10 ampicillin 100 μg/ml).
[0458] Incubation was carried out at 250 rpm and 37° C.
[0459] The main culture was inoculated about 1:100 with preculture, main culture: LB medium or suitable minimal medium with the respective antibiotics. Incubation at 250 rpm and 37° C.
[0460] Induction was carried out with 1 mM IPTG above an OD₅₇₈ₙₘ of 1. The incubation temperature was then lowered to room temperature (about 20° C.). The cells were centrifuged off 2 hours after induction. (See FIG. 9)

### Example 12

### Cell Disruption and Inclusion Body Purification (pRee024)

[0461] Insolubly expressed KBD-D (SEQ ID No.:168) (e.g. in inclusion bodies) was purified as follows:

[0462] The cell sediment from Example 2 was resuspended in 20 mM phosphate buffer with 100 mM NaCl pH=7.5 and disrupted by ultrasound treatment.

[0463] The disrupted cells were centrifuged again (4° C., 12 000 g, 20 minutes). The supernatant was discarded. The sediment was dissolved in buffer A (10 mM NaH₂PO₄, 2 mM KH₂PO₄, 100 mM NaCl, 8 M urea, 5 mM DTT). The mixture was then centrifuged again and the supernatant was applied to an Ni chelate Sepharose. Following application, washing was carried out with buffer A and 20 mM imidazole. Elution from the column was carried out with buffer B (10 mM NaH₂PO₄, 2 mM KH₂PO₄, 100 mM NaCl, 8 M urea, 5 mM DTT, 500 mM imidazole). The eluate was collected in fractions and analyzed by means of SDS-PAGE. Fractions which comprised purified KBD-D were renatured as described in Example 13.

### Example 13

### Renaturation of Keratin-Binding Domain D (SEQ ID No.:168)

[0464] Insolubly expressed keratin-binding domain D (e.g. from inclusion bodies) could be renatured by dialysis and thus activated. The procedure was as follows:

[0465] The fractions from Example 12 which comprised purified KBD-D were poured into a dialysis tube (MWCO 12-14 KD).

[0466] Dialysis was then carried out for about 1 hour against 1 l 8 M urea solution.

[0467] Then, over a period of 12 hours, 2 l of deionized water were metered in continuously by means of a peristaltic pump.

[0468] The contents of the dialysis tube were then removed. The KBD-D activated in this way was used for the following activity tests.

### Example 14

### Qualitative Binding to Skin

[0469] A visual qualitative test was used in order to examine whether the KBD-D (SEQ ID No.:168) binds to skin.

### Solutions Used:

[0470] Blocking solution: Western Blocking Reagent 1921673 Roche (10× solution) diluted in TBS

### TBS: 20 mM Tris; 150 mM NaCl pH 7.5

### TTBS: TBS+0.05% Tween 20

[0471] The first step is the transfer of the outer keratin layer of the skin to a stable support. For this purpose, a transparent adhesive tape was firmly applied to depilated human skin and removed again. The test can be carried out directly on the transparent adhesive tape, or the adhering keratin layer can be transferred to a glass slide through renewed adhesion. Binding was demonstrated as follows:
[0472] for incubation with the various reagents, transfer to a Falcon vessel
   if appropriate, addition of ethanol for degreasing, removal of ethanol and drying of the slide
[0473] incubation with blocking buffer for 1 h at room temperature
[0474] 2× washing for 5 min with TTBS
[0475] 1× washing for 5 min with TBS
[0476] incubation with the KBD to be tested (coupled to tag—e.g. His₆, HA etc.) in TBS/0.05% Tween 20 for 2-4 h at room temperature
[0477] removal of the supernatant
[0478] 3× washing with TBS
[0479] incubation for 1 h at room temperature with monoclonal mouse anti-tag (His6 or HA) antibodies with peroxidase conjugate (1:2000 in TBS+0.01% blocking) [Monoclonal AntipolyHistidine Peroxidase Conjugate, produced in mouse, lyophilized powder, Sigma]
[0480] 2× washing for 5 min with TTBS
[0481] 1× washing for 5 min with TBS
[0482] addition of phosphatase substrate (NBT-BCIP, Boehringer MA 1 tablet/40 ml of water 2.5 min; stop: with water)
[0483] optical detection of the colored precipitate with the naked eye or using a microscope.

[0484] A blue colored precipitate, being a reaction of the antipolyhistidine-AP conjugate interacting with the KBD-D, was visible on the transparent adhesive tape treated with KBD-D. As negative control, a transparent adhesive tape was treated only with buffer. No significant blue coloration could be seen here. These results show that KBD-D has bound to the skin keratin on the transparent adhesive tape.

### Example 15

### Quantitative Binding to Skin and Hair

[0485] In order to investigate the binding strength of the KBD-D (SEQ ID No.:168) to skin and hair compared to the KBD-B (SEQ ID No.:166), a quantitative test was carried out. In this test, firstly hair was incubated with KBD-B or KBD-D and excess KBD-B or -D was washed off. An antibody-peroxidase conjugate was then coupled via the His/tag of the KBD-B or -D. Nonbound antibody-peroxidase conjugate was washed off again. The bound antibody-peroxidase conjugate can convert a colorless substrate (TMB) into a colored product, which was measured photometrically at 405 nm. The intensity of the absorption indicates the amount of bound KBD-B or -D.

[0486] The test for binding to skin was carried out with human keratinocytes in microtiter plates as follows.
[0487] 2× washing with PBS/0.05% Tween 20
[0488] addition of 1 ml of 1% BSA in PBS and incubation for 1 h at room temperature, gentle swinging movements (900 rpm).
[0489] removal of the supernatant
[0490] addition of 100 μg of KBD in PBS with 0.05% Tween 20, incubation for 2 h at room temperature and gentle swinging movements (900 rpm).
[0491] removal of the supernatant
[0492] 3× washing with PBS/0.05% Tween 20
[0493] incubation with 1 ml of monoclonal mouse anti-tag-His6 antibodies for 2-4 h at room temperature, gentle swinging movement (900 rpm)
[0494] 3× washing with PBS/0.05% Tween 20
[0495] addition of peroxidase substrate (1 ml/Eppendorf vessel; composition see below) reaction until a blue coloration (about 90 seconds).
[0496] reaction stopped with 100 μl of 2 M H₂SO₄.
[0497] the absorption was measured at 405 nm.

### Peroxidase Substrate (Prepared Shortly Beforehand)

[0498] 0.1 ml TMB solution (42 mM TMB in DMSO)
+10 ml substrate buffer (0.1 M sodium acetate pH 4.9)
+14.7 μl H₂O₂ 3% strength

[0499] In order to characterize the hair binding of the KBD-D compared to the KBD B, the following binding assay was carried out:

[0500] 5 mg of hair (human) were cut into sections 5 mm in length and transferred to Eppendorf vessels (Protein low-bind).
[0501] addition of 1 ml of ethanol for degreasing
[0502] centrifugation, removal of ethanol and washing of the hair with H₂O
[0503] centrifugation, removal of the supernatant
[0504] addition of the keratin-binding domains to be tested (coupled to tag—e.g. His₆, HA etc.) in 1 ml of PBS/0.05% Tween 20; incubation for 2 h at room temperature with gentle swinging movements
[0505] centrifugation, removal of the supernatant
[0506] 3× washing with PBS/0.05% Tween 20
[0507] incubation with 1 ml monoclonal mouse anti-tag-(His6 or HA) antibodies with peroxidase conjugate (1:2000 in PBS/0.05% Tween 20) [Monoclonal AntipolyHistidine Peroxidase Conjugate, produced in mouse, lyophilized powder, Sigma] for 2-4 h at room temperature, gentle swinging movement
[0508] 3× washing with PBS/0.05% Tween 20
[0509] addition of peroxidase substrate (1 ml/Eppendorf vessel)
[0510] allow reaction to proceed until blue coloration (90 seconds).
[0511] stop the reaction with 100 μl of 2 M H₂SO₄.

[0512] The absorption was measured at 405 nm

### Peroxidase Substrate (Prepared Shortly Beforehand):

[0513] 0.1 ml TMB solution (42 mM TMB in DMSO)
+10 ml substrate buffer (0.1 M sodium acetate pH 4.9)
+14.7 pt H₂O₂ 3% strength
BSA=bovine serum albumin
PBS=phosphate buffered salt solution
Tween 20=polyoxyethylene sorbitan monolaureate, n about 20
TMB=3,5,3′,5′-tetramethylbenzidine

TABLE 5a
Quantitative binding of KBD-D or KBD-B to skin. The absorption
values listed are values standardized to the surface (of skin or hair)

| Keratin-binding domain | Absorption at 405 nm |
|---|---|
| KBD-D to skin | 3.69 |
| KBD-D to skin after 10% strength SDS | 3.15 |
| treatment | |
| KBD-B to skin | 0.93 |
| KBD-B to skin after 10% strength SDS | 0.185 |
| treatment | |

TABLE 5b
Quantitative binding of KBD-D to hair. The absorption values listed
are values standardized to the surface

| Keratin-binding domain | Absorption at 405 nm |
|---|---|
| KBD-D to hair | 0.88 |
| KBD-D to hair after 10% strength SDS | 0.62 |
| treatment | |

TABLE 5C
Quantitative binding of KBD-D and KBD-B to skin and hair
after 10% strength SDS treatment in % relative to
the KBD-D and KBD-B untreated hair or skin.

| | Relative absorption |
|---|---|
| | loss after 10% strength |
| Keratin-binding domain | SDS treatment in % |
| KBD-D to skin after 10% strength SDS | 15 |
| treatment | |
| KBD-B to skin after 10% strength SDS | 80 |
| treatment | |
| KBD-D to hair after 10% strength SDS | 30 |
| treatment | |
| KBD-B to hair after 10% strength SDS | 86 |
| treatment | |

[0514] These results show that the Protein KBD-D can bind to hair and more strongly to skin (see Tab. 5). In contrast to the KBD-B (SEQ ID No.: 166), the binding of the KBD-D (SEQ ID No.: 168) is only more weakly influenced by a washing with an up to 10% strength SDS solution (see Tab. 5a).

### Example 16

### Testing the Coupling Success (Ellmann's Test)

[0515] The success of the effector coupling was monitored via three different tests:
[0516] (i) Ellmann's test in which the number of free Cys-SH groups in the Protein before and after the effector coupling can be determined. Here, a considerable reduction in the free SH groups after coupling indicates good reaction progress.
[0517] (ii) Activity test in which the binding of the KBD-B (SEQ ID No.: 166) with and without coupled effector to hair can be measured. Good reaction control should not reduce the activity of KBD-effector compared with uncoupled KBD-B (SEQ ID No.: 166) (see Example 17).
[0518] (iii) Visible coloring of hair or skin as a result of the successful coupling of the dye to the KBD-R (SEQ ID No.: 166) (see Example 20).

[0519] Regarding (iii): The success of the effector coupling was tested as follows using Ellmann's test:

### Materials Required:

[0520] Ellmann's reagent: 5,5′-dithiobis(2-nitrobenzoic acid) (DTNB); 4 mg/1 ml in 0.1 M Na phosphate buffer
[0521] 0.1 M Na phosphate buffer pH 8.0
[0522] Cysteine solution (26.3 mg of cysteine hydrochloride monohydrate/100 ml Na phosphate buffer). The solutions were and must only be prepared shortly prior to use.

[0523] 1. In each case 25 μl, 50 μl, 100 μl, 150 μl, 200 μl and 250 μl of cysteine solution were pipetted into test tubes (13×100 mm) for a calibration curve. The Protein samples to be determined were poured into separate test tubes (volume <=250 μl). Of the KBD to be tested, at least an amount of 1 mg per reaction mixture was dispensed. In the case of the test tubes, the total volume was then adjusted in each case to 250 μl with Na phosphate buffer. If the volume of 250 μl of sample was exceeded (on account of the required 1 mg of KBD), this was taken into consideration when topping up in point 2 with 2.5 ml of Na phosphate buffer.

[0524] 2. Addition of in each case 50 μl of Ellmann's reagent and 2.5 ml of Na phosphate buffer. Briefly mix and incubate for 15 min at RT.

[0525] 3. Measure the absorption at 412 nm.

[0526] 4. Construct the calibration curves, plot and read off the values of the Protein samples to be determined.

[0527] Evaluating the Ellmann test after coupling reactions with various effectors shows that ⅔ of the free thiol groups can be coupled to activated reactive dyes (see Example 19) or dye with maleimidocaproic acid linker if the mixing ratio of KBD-B:dye is 1:2.

### Example 17

### Hair-Binding Activity of KBD-B-Dye

[0528] In order to test whether KBD-B (SEQ ID No.: 166) also binds with coupled dye to hair, a quantitative binding assay was carried out (see FIG. 9): in this test, hair was firstly incubated with KBD-B-dye and nonbound KBD-B-dye was washed off. A peroxidase was then coupled via the His tag of the KBD-B. Nonbound peroxidase was washed off again. The bound peroxidase can convert a colorless substrate (TMB) into a colored product, which was measured photometrically at 405 nm. The intensity of the absorption indicates the amount of bonded KBD-B-panthenol. As comparison sample, KBD-B without dye was chosen. For the exact procedure, see Example 10.

### Example 18

### Activation of the Vinylsulfone Reactive Anchors Present in the Reactive Dyes

[0529] 0.075 mol of dye (14-264, see Table 6) was dissolved in 800 ml of water and the pH was adjusted to 10.5 by adding 25% strength by weight NaOH solution. The reaction solution was stirred for 15 minutes at room temperature, during which the pH was kept at 10.5 until it remained stable. The pH was then adjusted to 4.5 by adding 21% strength by weight HCl solution and the reaction mixture was evaporated under reduced pressure (see FIG. 10).

### Example 19

### Coupling of Reactive Dyes to KBD-B (SEQ ID No.: 166)

[0530] During the reaction of dyes with the KBD-B, virtually physiological conditions should be maintained since the Protein otherwise unfolds, resulting in precipitation. This means essentially that no pure organic solvents can be used, and a pH close to neutral should be chosen. Furthermore, it is important that the reaction temperature for the coupling should not exceed 45° C.

[0531] For the coupling of reactive dyes, cysteines were used in the KBD (SEQ ID No.: 166). Thus, KBD-B (SEQ ID No.: 166) has four cysteines. Of these, two cysteines are inside the structure and are not accessible for the coupling of an effector (recognizable from the crystal structure). The two remaining cysteines close to the N terminus (amino acid positions 14 and 83; see sequence KBD-B (SEQ ID No.: 166) are accessible for an effector coupling.

[0532] The reactive dye capable of coupling was coupled to the KBD-B (SEQ ID No.: 166) via at least one of the two free SH groups of a cysteine. Ideally, the reaction between KBD-B and activated dye therefore takes place in the molar ratio 1:2.

### Example 19a

### Coupling of Reactive Dyes to KBD-D (SEQ ID No.: 168)

[0533] For coupling the activated dye, analogously to the KBD-B, cysteines can also be used in the KBD-D (SEQ ID No.: 168). Thus, KBD-D (SEQ ID No.: 168) has 24 cysteines. In addition, cysteine radicals capable of coupling can be introduced in a targeted manner by directed mutagenesis.

[0534] The coupling of the dye to the KBD-D (SEQ ID No.: 168) can thus take place analogously to the method described in Example 19 and the dyes (14-1 to 14-366) take place as described under 19 b) for the KBD-B using the KBD-D (see Ex. 65). The dyes 14_{—}153, 14_{—}154, 14_{—}155, 14_{—}156, 14_{—}181, 14_{—}182, 14_{—}183, 14_{—}276 and 14_{—}289 are already in the vinylsulfone form, i.e. these do not need to be activated (preeliminated), but can be reacted directly with the KBD-D (corresponding to FIG. 11). The KBD-D reactive dye obtained in this way could be used analogously to the KBD-D reactive dye from Ex. 65 in the cosmetic formulations according to Examples 66-108.

### Example 19b)

### Coupling of KBD-B (SEQ ID No.: 166) to

### a) Vinylsulfone Dyes (Formula 1):

[0535] The reaction between KBD-B and activated dyes takes place in the molar ratio 1:2 since the KBD-B has two free cysteines for effector coupling. The vinylsulfone dyes chosen for the coupling are usually synthesized in the sulfuric ester form and therefore have to be activated prior to the reaction with KBD-B to the vinylsulfone form because the dyes can only react with nucleophilic groups in their vinylsulfone form. Activation takes place under alkaline conditions, the dye in aqueous solution being adjusted to pH 11 at room temperature for 2 minutes. Then, prior to adding the Protein, the pH is adjusted to 7-8 with hydrochloric acid (see also Example 18).

[0536] The reaction solution is gently shaken for 30 min at 30° C., pH 7-8. During this, activated vinylsulfone dyes (e.g. 14-264, see Table 6) react with the thiol groups of the free cysteins of the KBD (see FIG. 2).

[0537] The following dyes (14_{—}1 to 14-291) can be reacted analogously with the KBD. The dyes 14_{—}153, 14_{—}154, 14_{—}155, 14_{—}156, 14_{—}181, 14_{—}182, 14_{—}183, 14_{—}276 and 14_{—}289 are already in the vinylsulfone form, i.e. these do not need to be activated (preeliminated), but can be reacted directly with the KBD (corresponding to FIG. 11). The color of the respective product is given.

TABLE 6

| | Structure | Color |
|---|---|---|
| 14_1 | [chemical structure] | yellow |
| 14_2 | [chemical structure] | black |
| | [chemical structure] | |
| 14_3 | [chemical structure] | black |
| 14_4 | [chemical structure] | black |
| | [chemical structure] | |
| 14_5 | [chemical structure] | black |
| | [chemical structure] | |
| 14_6 | [chemical structure] | blue |
| 14_7 | [chemical structure] | blue |
| 14_8 | [chemical structure] | blue |
| 14_9 | [chemical structure] | blue |
| 14_10 | [chemical structure] | blue |
| | [chemical structure] | |
| 14_11 | [chemical structure] | blue |
| 14_12 | [chemical structure] | blue |
| 14_13 | [chemical structure] | blue |
| 14_14 | [chemical structure] | blue |
| 14_15 | [chemical structure] | blue |
| 14_16 | [chemical structure] | blue |
| 14_17 | [chemical structure] | blue |
| 14_18 | [chemical structure] | blue |
| 14_19 | [chemical structure] | blue |
| 14_20 | [chemical structure] | blue |
| 14_21 | [chemical structure] | blue |
| 14_22 | [chemical structure] | blue |
| 14_23 | [chemical structure] | blue |
| 14_24 | [chemical structure] | blue |
| 14_25 | [chemical structure] | blue |
| 14_26 | [chemical structure] | blue |
| 14_267 | [chemical structure] | blue |
| 14_28 | [chemical structure] | blue |
| 14_29 | [chemical structure] | blue |
| 14_30 | [chemical structure] | blue |
| 14_31 | [chemical structure] | blue |
| 14_32 | [chemical structure] | blue |
| 14_33 | [chemical structure] | blue |
| 14_34 | [chemical structure] | blue |
| 14_35 | [chemical structure] | green |
| 14_36 | [chemical structure] | blue |
| 14_37 | [chemical structure] | blue |
| 14_38 | [chemical structure] | blue |
| 14_39 | [chemical structure] | blue |
| 14_40 | [chemical structure] | brown |
| 14_41 | [chemical structure] | brown |
| 14_42 | [chemical structure] | brown |
| 14_43 | [chemical structure] | brown |
| 14_44 | [chemical structure] | brown |
| 14_45 | [chemical structure] | green |
| 14_46 | [chemical structure] | green |
| 14_47 | [chemical structure] | green |
| 14_48 | [chemical structure] | green |
| 14_49 | [chemical structure] | orange |
| 14_50 | [chemical structure] | orange |
| 14_51 | [chemical structure] | orange |
| 14_52 | [chemical structure] | orange |
| 14_53 | [chemical structure] | orange |
| 14_54 | [chemical structure] | orange |
| 14_55 | [chemical structure] | orange |
| 14_56 | [chemical structure] | orange |
| 14_57 | [chemical structure] | orange |
| 14_58 | [chemical structure] | orange |
| 14_59 | [chemical structure] | orange |
| 14_60 | [chemical structure] | orange |
| 14_61 | [chemical structure] | orange |
| 14_62 | [chemical structure] | orange |
| 14_63 | [chemical structure] | orange |
| 14_64 | [chemical structure] | orange |
| 14_65 | [chemical structure] | orange |
| 14_66 | [chemical structure] | orange |
| 14_67 | [chemical structure] | orange |
| 14_68 | [chemical structure] | red |
| 14_69 | [chemical structure] | red |
| 14_70 | [chemical structure] | red |
| 14_71 | [chemical structure] | red |
| 14_72 | [chemical structure] | red |
| 14_73 | [chemical structure] | red |
| 14_74 | [chemical structure] | red |
| 14_75 | [chemical structure] | red |
| 14_76 | [chemical structure] | red |
| 14_77 | [chemical structure] | red |
| 14_78 | [chemical structure] | red |
| 14_79 | [chemical structure] | red |
| 14_80 | [chemical structure] | red |
| 14_81 | [chemical structure] | red |
| 14_82 | [chemical structure] | red |
| 14_83 | [chemical structure] | red |
| 14_84 | [chemical structure] | red |
| 14_85 | [chemical structure] | red |
| 14_86 | [chemical structure] | red |
| 14_87 | [chemical structure] | red |
| 14_88 | [chemical structure] | red |
| 14_89 | [chemical structure] | red |
| 14_90 | [chemical structure] | red |
| 14_91 | [chemical structure] | red |
| 14_92 | [chemical structure] | red |
| 14_93 | [chemical structure] | red |
| 14_94 | [chemical structure] | red |
| 14_95 | [chemical structure] | red |
| 14_96 | [chemical structure] | red |
| 14_97 | [chemical structure] | red |
| 14_98 | [chemical structure] | red |
| 14_99 | [chemical structure] | red |
| 14_100 | [chemical structure] | red |
| 14_101 | [chemical structure] | red |
| 14_102 | [chemical structure] | red |
| 14_103 | [chemical structure] | red |
| 14_104 | [chemical structure] | violet |
| 14_105 | [chemical structure] | violet |
| 14_106 | [chemical structure] | violet |
| 14_107 | [chemical structure] | violet |
| 14_108 | [chemical structure] | violet |
| 14_109 | [chemical structure] | yellow |
| 14_110 | [chemical structure] | yellow |
| 14_111 | [chemical structure] | yellow |
| 14_112 | [chemical structure] | yellow |
| 14_113 | [chemical structure] | yellow |
| 14_114 | [chemical structure] | yellow |
| 14_115 | [chemical structure] | yellow |
| 14_116 | [chemical structure] | yellow |
| 14_117 | [chemical structure] | yellow |
| 14_118 | [chemical structure] | yellow |
| 14_119 | [chemical structure] | yellow |
| 14_120 | [chemical structure] | yellow |
| 14_121 | [chemical structure] | yellow |
| 14_122 | [chemical structure] | yellow |
| 14_123 | [chemical structure] | yellow |
| 14_124 | [chemical structure] | yellow |
| 14_125 | [chemical structure] | yellow |
| 14_126 | [chemical structure] | yellow |
| 14_127 | [chemical structure] | yellow |
| 14_128 | [chemical structure] | yellow |
| 14_129 | [chemical structure] | yellow |
| 14_130 | [chemical structure] | yellow |
| 14_131 | [chemical structure] | yellow |
| 14_132 | [chemical structure] | yellow |
| 14_133 | [chemical structure] | yellow |
| 14_134 | [chemical structure] | yellow |
| 14_135 | [chemical structure] | yellow |
| 14_136 | [chemical structure] | yellow |
| 14_137 | [chemical structure] | yellow |
| 14_138 | [chemical structure] | black |
| | [chemical structure] | |
| 14_139 | [chemical structure] | black |
| 14_140 | [chemical structure] | blue |
| 14_141 | [chemical structure] | blue |
| 14_142 | [chemical structure] | blue |
| 14_143 | [chemical structure] | blue |
| 14_144 | [chemical structure] | brown |
| 14_145 | [chemical structure] | orange |
| 14_146 | [chemical structure] | red |
| 14_147 | [chemical structure] | red |
| 14_148 | [chemical structure] | red |
| 14_149 | [chemical structure] | red |
| 14_150 | [chemical structure] | yellow |
| 14_151 | [chemical structure] | yellow |
| 14_152 | [chemical structure] | yellow |
| 14_153 | [chemical structure] | blue |
| 14_154 | [chemical structure] | red |
| 14_155 | [chemical structure] | blue |
| 14_156 | [chemical structure] | orange |
| 14_157 | [chemical structure] | black |
| 14_158 | [chemical structure] | darkgreen |
| 14_159 | [chemical structure] | black |
| 14_160 | [chemical structure] | green |
| 14_161 | [chemical structure] | green |
| 14_162 | [chemical structure] | green |
| 14_163 | [chemical structure] | green |
| 14_164 | [chemical structure] | green |
| 14_165 | [chemical structure] | black |
| 14_166 | [chemical structure] | black |
| 14_167 | [chemical structure] | black |
| 14_168 | [chemical structure] | black |
| 14_169 | [chemical structure] | black |
| 14_170 | [chemical structure] | black |
| 14_171 | [chemical structure] | black |
| 14_172 | [chemical structure] | black |
| 14_173 | [chemical structure] | black |
| 14_174 | [chemical structure] | black |
| 14_175 | [chemical structure] | black |
| 14_176 | [chemical structure] | black |
| 14_177 | [chemical structure] | violet |
| 14_178 | [chemical structure] | black |
| 14_179 | [chemical structure] | black |
| 14_180 | [chemical structure] | black |
| 14_181 | [chemical structure] | darkgreen |
| 14_182 | [chemical structure] | black |
| 14_183 | [chemical structure] | black |
| 14_184 | [chemical structure] | darkblue |
| 14_185 | [chemical structure] | blue |
| 14_186 | [chemical structure] | darkgreen |
| 14_187 | [chemical structure] | black |
| 14_188 | [chemical structure] | darkgreen |
| 14_189 | [chemical structure] | black |
| 14_190 | [chemical structure] | green |
| 14_191 | [chemical structure] | green |
| 14_192 | [chemical structure] | green |
| 14_193 | [chemical structure] | black |
| 14_194 | [chemical structure] | black |
| 14_195 | [chemical structure] | black |
| 14_196 | [chemical structure] | black |
| 14_197 | [chemical structure] | black |
| 14_198 | [chemical structure] | black |
| 14_199 | [chemical structure] | black |
| 14_200 | [chemical structure] | black |
| 14_201 | [chemical structure] | black |
| 14_202 | [chemical structure] | black |
| 14_203 | [chemical structure] | black |
| 14_204 | [chemical structure] | black |
| 14_205 | [chemical structure] | black |
| 14_206 | [chemical structure] | black |
| 14_207 | [chemical structure] | black |
| 14_208 | [chemical structure] | black |
| 14_209 | [chemical structure] | black |
| 14_210 | [chemical structure] | black |
| 14_211 | [chemical structure] | black-violet |
| 14_212 | [chemical structure] | black |
| 14_213 | [chemical structure] | black |
| 14_214 | [chemical structure] | black |
| 14_215 | [chemical structure] | black-violet |
| 14_216 | [chemical structure] | black |
| 14_217 | [chemical structure] | black |
| 14_218 | [chemical structure] | black |
| 14_219 | [chemical structure] | black |
| 14_220 | [chemical structure] | black |
| 14_221 | [chemical structure] | black |
| 14_222 | [chemical structure] | black |
| 14_223 | [chemical structure] | black |
| 14_224 | [chemical structure] | black |
| 14_225 | [chemical structure] | black |
| 14_226 | [chemical structure] | black |
| 14_227 | [chemical structure] | black |
| 14_228 | [chemical structure] | black |
| 14_229 | [chemical structure] | black |
| 14_230 | [chemical structure] | black |
| 14_231 | [chemical structure] | black |
| 14_232 | [chemical structure] | black |
| 14_233 | [chemical structure] | black |
| 14_234 | [chemical structure] | black |
| 14_235 | [chemical structure] | black |
| 14_236 | [chemical structure] | black |
| 14_237 | [chemical structure] | black |
| 14_238 | [chemical structure] | violet |
| 14_239 | [chemical structure] | black |
| 14_240 | [chemical structure] | violet |
| 14_241 | [chemical structure] | black |
| 14_242 | [chemical structure] | black |
| 14_243 | [chemical structure] | black |
| 14_244 | [chemical structure] | black |
| 14_245 | [chemical structure] | black |
| 14_246 | [chemical structure] | black |
| 14_247 | [chemical structure] | black |
| 14_248 | [chemical structure] | black |
| 14_249 | [chemical structure] | black |
| 14_250 | [chemical structure] | black |
| 14_251 | [chemical structure] | black |
| 14_252 | [chemical structure] | black |
| 14_253 | [chemical structure] | black |
| 14_254 | [chemical structure] | black |
| 14_255 | [chemical structure] | black |
| 14_256 | [chemical structure] | black |
| 14_257 | [chemical structure] | black |
| 14_258 | [chemical structure] | black |
| 14_259 | [chemical structure] | beige |
| 14_260 | [chemical structure] | violet |
| 14_261 | [chemical structure] | red |
| 14_262 | [chemical structure] | red |
| 14_263 | [chemical structure] | red |
| 14_264 | [chemical structure] | red |
| 14_265 | [chemical structure] | red |
| 14_266 | [chemical structure] | fuchsia |
| 14_267 | [chemical structure] | violet |
| 14_268 | [chemical structure] | orange |
| 14_269 | [chemical structure] | red |
| 14_270 | [chemical structure] | red |
| 14_271 | [chemical structure] | yellow |
| 14_272 | [chemical structure] | yellow |
| 14_273 | [chemical structure] | yellow |
| 14_274 | [chemical structure] | red |
| 14_275 | [chemical structure] | red |
| 14_276 | [chemical structure] | red |
| 14_277 | [chemical structure] | brown |
| 14_278 | [chemical structure] | rust-red |
| 14_279 | [chemical structure] | red-brown |
| 14_280 | [chemical structure] | brown |
| 14_281 | [chemical structure] | brown |
| 14_282 | [chemical structure] | brown |
| 14_283 | [chemical structure] | red-brown |
| 14_284 | [chemical structure] | brown |
| 14_285 | [chemical structure] | olivebrown |
| 14_286 | [chemical structure] | red-brown |
| 14_287 | [chemical structure] | red-brown |
| 14_288 | [chemical structure] | blue |
| 14_289 | [chemical structure] | blue |
| 14_290 | [chemical structure] | blackberry |
| 14_291 | [chemical structure] | red |

b) Dyes of formulae 3, 4, 5:

[0538] Alternatively, dyes (e.g. dye 14_{—}354, FIG. 12) which have a substitutable halogen atom in their reactive anchor can also be used. These dyes can be reacted without activation with the SH groups of the KBD-B. The reaction between KBD and dye 14_{—}354 takes place in the molar ratio 1:2 since the KBD-B has two free cysteines for the effector coupling. The reaction solution is gently shaken for 30 min at 30° C., pH 8-9.

[0539] The following dyes (14_{—}292 to 14_{—}366) with KBD-B (SEQ ID No.: 166) or KBD-D (SEQ ID No.: 168) can be reacted analogously. The color of the respective product is given.

TABLE 7

| | Structure | Color |
|---|---|---|
| 14_292 | [chemical structure] | black |
| 14_293 | [chemical structure] | blue |
| 14_294 | [chemical structure] | blue |
| 14_295 | [chemical structure] | blue |
| 14_296 | [chemical structure] | blue |
| 14_297 | [chemical structure] | blue |
| 14_298 | [chemical structure] | blue |
| 14_299 | [chemical structure] | blue |
| 14_300 | [chemical structure] | blue |
| 14_301 | [chemical structure] | blue |
| 14_302 | [chemical structure] | blue |
| 14_303 | [chemical structure] | blue |
| 14_304 | [chemical structure] | blue |
| 14_305 | [chemical structure] | blue |
| 14_306 | [chemical structure] | blue |
| 14_307 | [chemical structure] | brown |
| 14_308 | [chemical structure] | brown |
| 14_309 | [chemical structure] | brown |
| 14_310 | [chemical structure] | green |
| 14_311 | [chemical structure] | green |
| 14_312 | [chemical structure] | orange |
| 14_313 | [chemical structure] | orange |
| 14_314 | [chemical structure] | orange |
| 14_315 | [chemical structure] | orange |
| 14_316 | [chemical structure] | orange |
| 14_317 | [chemical structure] | orange |
| 14_318 | [chemical structure] | red |
| 14_319 | [chemical structure] | red |
| 14_320 | [chemical structure] | red |
| 14_321 | [chemical structure] | red |
| 14_322 | [chemical structure] | red |
| 14_323 | [chemical structure] | red |
| 14_324 | [chemical structure] | red |
| 14_325 | [chemical structure] | red |
| 14_326 | [chemical structure] | red |
| 14_327 | [chemical structure] | yellow |
| 14_328 | [chemical structure] | yellow |
| 14_329 | [chemical structure] | yellow |
| 14_330 | [chemical structure] | yellow |
| 14_331 | [chemical structure] | yellow |
| 14_332 | [chemical structure] | yellow |
| 14_333 | [chemical structure] | yellow |
| 14_334 | [chemical structure] | blue |
| 14_335 | [chemical structure] | blue |
| 14_336 | [chemical structure] | blue |
| 14_337 | [chemical structure] | blue |
| 14_338 | [chemical structure] | blue |
| 14_339 | [chemical structure] | blue |
| 14_340 | [chemical structure] | blue |
| 14_341 | [chemical structure] | blue |
| 14_342 | [chemical structure] | brown |
| 14_343 | [chemical structure] | brown |
| 14_344 | [chemical structure] | orange |
| 14_345 | [chemical structure] | orange |
| 14_346 | [chemical structure] | orange |
| 14_347 | [chemical structure] | orange |
| 14_348 | [chemical structure] | orange |
| 14_349 | [chemical structure] | red |
| 14_350 | [chemical structure] | red |
| 14_351 | [chemical structure] | red |
| 14_352 | [chemical structure] | red |
| 14_353 | [chemical structure] | red |
| 14_354 | [chemical structure] | red |
| 14_355 | [chemical structure] | red |
| 14_356 | [chemical structure] | red |
| 14_357 | [chemical structure] | red |
| 14_358 | [chemical structure] | red |
| 14_359 | [chemical structure] | yellow |
| 14_360 | [chemical structure] | yellow |
| 14_361 | [chemical structure] | yellow |
| 14_362 | [chemical structure] | yellow |
| 14_363 | [chemical structure] | yellow |
| 14_364 | [chemical structure] | yellow |
| 14_365 | [chemical structure] | yellow |
| 14_366 | [chemical structure] | yellow |

[0540] After the reactions described under a) and b), a molecule with free SH groups (e.g. cysteine) can be added which deactivates unreacted dye. Should the dyes used here not be purified after the synthesis, they comprise both reactive and unreactive secondary components. The secondary components which do not have a reactive anchor, or onto whose reactive anchor e.g. free cysteine has been bonded after the actual KBD coupling reaction do not react with the KBD-B molecules.

[0541] Such secondary components can be removed after the coupling reaction or e.g. during the hair-coloring process. One option consists in purifying the KBD-B reacted with the dye, e.g. by column chromatography. It is also possible to carry out the reaction between KBD-B and the reactive dye in a type of “column reactor”. In this connection, the KBD-B could be coupled to a nickel affinity column, the dye bonded to KBD-B and the unfixed dye radicals be washed out directly. The KBD-B-dye can then be eluted from the column. Another option is to apply to hair the KBD-B reacted with the dye together with the nonreactive secondary components, and to wash out the nonbonded dye fractions from the hair. For this, a 15% strength Tween 20 solution in water, for example, is suitable.

### Example 20

### Hair Coloring with KBD-B-Dye Couplings

[0542] Firstly, a red reactive dye 14_{—}264 was coupled to KBD-B (SEQ ID No.: 166) according to the method described above. In order to show that the binding of the KBD-B-dye coupling to hair is mediated by the protein and not by the free dye itself, the same dye was treated in each case only with cysteine but without KBD-B. Then, KBD-B-14_{—}264 and 14_{—}264 were each placed onto 5 mg of hair, which was briefly incubated, and nonbound KBD-B-dye or pure dye was washed off using a 15% strength Tween 20 solution. The result clearly shows that the binding to the hair is mediated by the KBD-B and coloring of the hair has taken place.

[0543] If, on the other hand, it is desired to decolor the hair again, a wash with a SDS fraction of 15%, or a treatment with a keratin-containing solution is suitable.

[0544] Dermocosmetic preparations according to the invention are described below, comprising the keratin-binding effector molecule prepared according to Example 19 (keratin-binding domain according to SEQ ID No.: ID 166 coupled with the dye 14_{—}264). Said keratin-binding effector molecule is referred to in the examples below as keratin-binding domain-reactive dye 14_{—}264. It will be appreciated by the person skilled in the art that all other dyes described in Tables 6 and 7 can be coupled with the KBD according to Example 19, 19 a or 19 b and be used in the preparations given below.

### Example 21

### Shampoo (Base Formulation without Keratin-Binding Domain-Reactive Dye)

| | % | Ingredient (INCI) |
|---|---|---|
| A | 15.00 | Cocamidopropyl Betaine |
| | 10.00 | Disodium Cocoamphodiacetate |
| | 5.00 | Polysorbate 20 |
| | 5.00 | Decyl Glucoside |
| | q.s. | Perfume oil |
| | q.s. | Preservative |
| | 1.25 | Polyquaternium-16 |
| | 2.00 | Laureth-3 |
| | q.s. | Citric Acid |
| | 57.75 | Aqua dem. |
| B | 3.00 | PEG-150 Distearate |

Preparation: Weigh in the components of phase A and dissolve. Adjust the pH to 6-7. Add phase B and heat to about 50° C. Cool to room tern perature with stirring.

[0546] The content of keratin-binding domain-reactive dye 14_{—}264 in the examples below refers to 100% keratin-binding domain-reactive dye 14_{—}264. The active ingredient according to the invention can be used either in pure form or as an aqueous solution. In the case of the aqueous solution, the content of water dem. in the respective formulation must be adapted.

### Example 22

### Hair-Coloring Shampoo

| | |
|---|---|
| % | Ingredient (INCI) |

Variant 1

| | | |
|---|---|---|
| A | 15.00 | Cocamidopropyl Betaine |
| | 10.00 | Disodium Cocoamphodiacetate |
| | 5.00 | Polysorbate 20 |
| | 5.00 | Decyl Glucoside |
| | q.s. | Perfume oil |
| | q.s. | Preservative |
| | 1.25 | Polyquaternium-16 |
| | 2.00 | Laureth-3 |
| | q.s. | Citric Acid |
| | 1.00 | Keratin-binding domain-reactive dye 14_264 |
| | 57.76 | Aqua dem. |
| B | 3.00 | PEG-150 Distearate |

Variant 2

| | | |
|---|---|---|
| A | 15.00 | Cocamidopropyl Betaine |
| | 10.00 | Disodium Cocoamphodiacetate |
| | 5.00 | Polysorbate 20 |
| | 5.00 | Decyl Glucoside |
| | q.s. | Perfume oil |
| | q.s. | Preservative |
| | 1.25 | Polyquaternium-16 |
| | 2.00 | Laureth-3 |
| | q.s. | Citric Acid |
| | 5.00 | Keratin-binding domain-reactive dye 14_264 |
| | 53.75 | Aqua dem. |
| B | 3.00 | PEG-150 Distearate |

Preparation: Weigh in the components of phase A and dissolve. Adjust the pH to 6-7 Add phase B and heat to about 40° C. Cool rapidly to room temperature with stirring.

### Example 23

### Color Styling Mousse

| | |
|---|---|
| % | Ingredient (INCI) |

Variant 1

| | | |
|---|---|---|
| A | 2.00 | Cocotrimonium Methosulfate |
| | q.s. | Perfume oil |
| B | 6.70 | Acrylates Copolymer |
| | 0.60 | Aminomethyl Propanol |
| | 0.20 | Ceteareth-25 |
| | 0.20 | Panthenol |
| | 0.20 | Hydroxyethylcellulose |
| | 10.00 | Alcohol |
| | 69.97 | Aqua dem. |
| | 1.0 | Keratin-binding domain-reactive dye 14_264 |
| C | 10.00 | Propane/Butane |

Variant 2

| | | |
|---|---|---|
| A | 2.00 | Cocotrimonium Methosulfate |
| | q.s. | Perfume oil |
| B | 6.70 | Acrylates Copolymer |
| | 0.60 | Aminomethyl Propanol |
| | 0.20 | Ceteareth-25 |
| | 0.20 | Panthenol |
| | 0.20 | Hydroxyethylcellulose |
| | 10.00 | Alcohol |
| | 69.97 | Aqua dem. |
| | 0.5 | Keratin-binding domain-reactive dye 14_264 |
| C | 10.00 | Propane/Butane |

Preparation: Mix the components of phase A. Weigh in phase B and dissolve to give a clear solution, then stir into phase A. Bottle with phase C.

### Example 24

### Color Styling Mousse

| | |
|---|---|
| % | Ingredient (INCI) |

Variant 1

| | | |
|---|---|---|
| A | 2.00 | Cocotrimonium Methosulfate |
| | q.s. | Perfume oil |
| B | 7.00 | Polyquaternium-46 |
| | 2.00 | Polyquaternium-11 |
| | 78.87 | Aqua dem. |
| | 2.0 | Keratin-binding domain-reactive dye 14_264 |
| C | 10.00 | Propane/Butane |

Variant 2

| | | |
|---|---|---|
| A | 2.00 | Cocotrimonium Methosulfate |
| | q.s. | Perfume oil |
| B | 7.00 | Polyquaternium-46 |
| | 2.00 | Polyquaternium-11 |
| | 78.87 | Aqua dem. |
| | 1.0 | Keratin-binding domain-reactive dye 14_264 |
| C | 10.00 | Propane/Butane |

Preparation: Mix the components of phase A. Weigh in phase B and dissolve to give a clear solution, then stir into phase A. Bottle with phase C.

### Example 25

[0550] Two tresses of blond unbleached hair: European natural hair, color 9/0, natural blond (2 g) are treated with 0.5 g of the hair-coloring shampoo Example 22/variant 1 and the hair-coloring shampoo is left on the hair for 15 min. The hair tresses are then washed with water and cleansed using shampoo Example 21 and dried. The hair is completely red in color. Blond hair can no longer be detected. One tress is retained as comparison.

[0551] The second tress is then washed five times with shampoo Example 21 and dried. After the fifth wash, the tress is compared with the retained sample. The tress washed five times is still completely red in color. The two tresses have the same red shade. Visually, no difference in the color depth can be seen.

### Example 26

[0552] Two tresses of white hair: selected, white European natural hair (2 g) are treated with 0.5 g of the hair coloring shampoo Example 22/variant 1 and the hair-coloring shampoo is left on the hair for 15 min. The hair tresses are then washed with water and cleansed using shampoo Example 21 and dried. The hair is completely red in color. White hair can no longer be detected. One tress is retained as comparison.

[0553] The second tress is then washed five times with shampoo Example 21 and dried. After the fifth wash, the tress is compared with the retained sample. The tress washed five times is still completely red in color. The two tresses have the same red shade. Visually, no difference in color depth can be seen.

### Example 27

[0554] Two tresses of blond nonbleached hair: European natural hair, color 9/0, natural blond (2 g) are treated with 0.5 g of the color styling mousse Example 23/variant 2 and the color styling mousse is left on the hair for 15 min. The hair tresses are then washed with water and cleansed using shampoo Example 21 and dried. The hair is completely red in color. Blond hair can no longer be detected. One tress is retained as comparison.

[0555] The second tress is then washed five times with shampoo Example 21 and dried. After the fifth wash, the tress is compared with the retained sample. The tress washed five times is still completely red in color. The two tresses have the same red shade. Visually, no difference in the color depth can be seen.

### Example 28

[0556] Two tresses of white hair: selected white European natural hair (2 g) are treated with 0.5 g of the color styling mousse Example 23/variant 2 and the color styling mousse is left on the hair for 15 min. The hair tresses are then washed with water and cleansed with shampoo Example 21 and dried. The hair is completely red in color. White hair can no longer be detected. One tress is retained as comparison.

[0557] The second tress is then washed five times with shampoo Example 21 and dried. After the fifth wash, the tress is compared with the retained sample. The tress washed five times is still completely red in color. The two tresses have the same red shade. Visually, no difference in the color depth can be seen.

### Example 29

[0558] Two tresses of blond unbleached hair: European natural hair, color 9/0, natural blond (2 g) are treated with 0.5 g of the color styling mousse Example 24/variant 1 and the color styling mousse is left on the hair for 15 min. The hair tresses are then washed with water and cleansed with shampoo Example 21 and dried. The hair is completely red in color. Blond hair can no longer be detected. One tress is retained as comparison.

[0559] The second tress is then washed five times with shampoo Example 21 and dried. After the fifth wash, the tress is compared with the retained sample. The tress washed five times is still completely red in color. The two tresses have the same red shade. Visually, no difference in the color depth can be seen.

### Example 30

[0560] Two tresses of white hair: selected white European natural hair (2 g) are treated with 0.5 g of the color styling mousse Example 23/variant 1 and the color styling mousse is left on the hair for 15 min. The hair tresses are then washed with water and cleansed with shampoo Example 21 and dried. The hair is completely red in color. White hair can no longer be detected. One tress is retained as comparison.

[0561] The second tress is then washed five times with shampoo Example 21 and dried. After the fifth wash, the tress is compared with the retained sample. The tress washed five times is still completely red in color. The two tresses have the same red shade. Visually, no difference in the color depth can be seen.

### Example 31

### Use of the KBD in an Emulsion for Daycare—O/W Type

| | |
|---|---|
| % | Ingredient (INCI) |

Al 1%:

| | | |
|---|---|---|
| A | 1.7 | Ceteareth-6, Stearyl Alcohol |
| | 0.7 | Ceteareth-25 |
| | 2.0 | PEG-14 Dimethicone |
| | 3.6 | Cetearyl Alcohol |
| | 6.0 | Ethylhexyl Methoxycinnamate |
| | 2.0 | Dibutyl Adipate |
| B | 5.0 | Glycerin |
| | 0.2 | Disodium EDTA |
| | 1.0 | Panthenol |
| | q.s. | Preservative |
| | 69.8 | Aqua dem. |
| C | 4.0 | Caprylic/Capric Triglyceride, Sodium Acrylates Copolymer |
| D | 0.2 | Sodium Ascorbyl Phosphate |
| | 1.0 | Tocopheryl Acetate |
| | 0.2 | Bisabolol |
| | 1.0 | Caprylic/Capric Triglyceride, Sodium Ascorbate, Tocopherol, |
| | | Retinol |
| | 1.0 | Aqueous solution with about 5% keratin-binding domain- |
| | | reactive dye 14_264 |
| E | q.s. | Sodium Hydroxide |

Al 5%:

| | | |
|---|---|---|
| A | 1.7 | Ceteareth-6, Stearyl Alcohol |
| | 0.7 | Ceteareth-25 |
| | 2.0 | PEG-14 Dimethicone |
| | 3.6 | Cetearyl Alcohol |
| | 6.0 | Ethylhexyl Methoxycinnamate |
| | 2.0 | Dibutyl Adipate |
| B | 5.0 | Glycerin |
| | 0.2 | Disodium EDTA |
| | 1.0 | Panthenol |
| | q.s. | Preservative |
| | 65.8 | Aqua dem. |
| C | 4.0 | Caprylic/Capric Triglyceride, Sodium Acrylates Copolymer |
| D | 0.2 | Sodium Ascorbyl Phosphate |
| | 1.0 | Tocopheryl Acetate |
| | 0.2 | Bisabolol |
| | 1.0 | Caprylic/Capric Triglyceride, Sodium Ascorbate, Tocopherol, |
| | | Retinol |
| | 5.0 | Aqueous solution with about 5% keratin-binding domain- |
| | | reactive dye 14_264 |
| E | q.s. | Sodium Hydroxide |

Preparation: Heat phases A and B separately from one another to about 80° C. Stir Phase B into phase A and homogenize. Stir phase C into the combined phases A and B and homogenize again. Cool with stirring to about 40° C., add phase D, adjust the pH to about 6.5 using phase E, homogenize and cool to room temperature with stirring.

[0563] Note: The formulation is prepared without protective gas. Bottling must take place into oxygen-impermeable packagings, e.g. aluminum tubes.

### Example 32

### Use of the KBD in a Protective Day Cream—O/W Type

| | |
|---|---|
| % | Ingredient (INCI) |

Al 1%:

| | | |
|---|---|---|
| A | 1.7 | Ceteareth-6, Stearyl Alcohol |
| | 0.7 | Ceteareth-25 |
| | 2.0 | PEG-14 Dimethicone |
| | 3.6 | Cetearyl Alcohol |
| | 6.0 | Ethylhexyl Methoxycinnamate |
| | 2.0 | Dibutyl Adipate |
| B | 5.0 | Glycerin |
| | 0.2 | Disodium EDTA |
| | 1.0 | Panthenol |
| | q.s. | Preservative |
| | 70.6 | Aqua dem. |
| C | 4.0 | Caprylic/Capric Triglyceride, Sodium Acrylates Copolymer |
| D | 1.0 | Sodium Ascorbyl Phosphate |
| | 1.0 | Tocopheryl Acetate |
| | 0.2 | Bisabolol |
| | 1.0 | Aqueous solution with about 5% keratin-binding domain- |
| | | reactive dye 14_264 |
| E | q.s. | Sodium Hydroxide |

Al 5%:

| | | |
|---|---|---|
| A | 1.7 | Ceteareth-6, Stearyl Alcohol |
| | 0.7 | Ceteareth-25 |
| | 2.0 | PEG-14 Dimethicone |
| | 3.6 | Cetearyl Alcohol |
| | 6.0 | Ethylhexyl Methoxycinnamate |
| | 2.0 | Dibutyl Adipate |
| B | 5.0 | Glycerin |
| | 0.2 | Disodium EDTA |
| | 1.0 | Panthenol |
| | q.s. | Preservative |
| | 66.6 | Aqua dem. |
| C | 4.0 | Caprylic/Capric Triglyceride, Sodium Acrylates Copolymer |
| D | 1.0 | Sodium Ascorbyl Phosphate |
| | 1.0 | Tocopheryl Acetate |
| | 0.2 | Bisabolol |
| | 5.0 | Aqueous solution with about 5% keratin-binding domain- |
| | | reactive dye 14_264 |
| E | q.s. | Sodium Hydroxide |

Preparation: Heat phases A and B separately from one another to about 80° C. Stir phase B into phase A and homogenize. Incorporate phase C into the combined phases A and B and homogenize. Cool with stirring to about 40° C. Add phase D, adjust the pH to about 6.5 using phase E and homogenize. Cool to room temperature with stirring.

### Example 33

### Use of the KBD in a Face-Cleansing Lotion—O/W Type

| | |
|---|---|
| % | Ingredient (INCI) |

Al 1%:

| | | |
|---|---|---|
| A | 10.0 | Cetearyl Ethylhexanoate |
| | 10.0 | Caprylic/Capric Triglyceride |
| | 1.5 | Cyclopentasiloxane, Cyclohexasiloxane |
| | 2.0 | PEG-40 Hydrogenated Castor Oil |
| B | 3.5 | Caprylic/Capric Triglyceride, Sodium Acrylates Copolymer |
| C | 1.0 | Tocopheryl Acetate |
| | 0.2 | Bisabolol |
| | q.s. | Preservative |
| | q.s. | Perfume oil |
| D | 3.0 | Polyquaternium-44 |
| | 0.5 | Cocotrimonium Methosulfate |
| | 0.5 | Ceteareth-25 |
| | 2.0 | Panthenol, Propylene Glycol |
| | 4.0 | Propylene Glycol |
| | 0.1 | Disodium EDTA |
| | 1.0 | Aqueous solution with about 5% keratin-binding domain- |
| | | reactive dye 14_264 |
| | 60.7 | Aqua dem. |

Al 5%:

| | | |
|---|---|---|
| A | 10.0 | Cetearyl Ethylhexanoate |
| | 10.0 | Caprylic/Capric Triglyceride |
| | 1.5 | Cyclopentasiloxane, Cyclohexasiloxane |
| | 2.0 | PEG-40 Hydrogenated Castor Oil |
| B | 3.5 | Caprylic/Capric Triglyceride, Sodium Acrylates Copolymer |
| C | 1.0 | Tocopheryl Acetate |
| | 0.2 | Bisabolol |
| | q.s. | Preservative |
| | q.s. | Perfume oil |
| D | 3.0 | Polyquaternium-44 |
| | 0.5 | Cocotrimonium Methosulfate |
| | 0.5 | Ceteareth-25 |
| | 2.0 | Panthenol, Propylene Glycol |
| | 4.0 | Propylene Glycol |
| | 0.1 | Disodium EDTA |
| | 5.0 | Aqueous solution with about 5% keratin-binding domain- |
| | | reactive dye 14_264 |
| | 56.7 | Aqua dem. |

Preparation: Dissolve phase A. Stir phase B into phase A. Incorporate phase C into the combined phases A and B. Dissolve phase D, stir into the combined phases A, B and C and homogenize. After-stir for 15 min.

### Example 34

### Use of the KBD in a Daily Care Body Spray

| | |
|---|---|
| % | Ingredient (INCI) |

Al 1%:

| | | |
|---|---|---|
| A | 3.0 | Ethylhexyl Methoxycinnamate |
| | 2.0 | Diethylamino Hydroxybenzoyl Hexyl Benzoate |
| | 1.0 | Polyquaternium-44 |
| | 3.0 | Propylene Glycol |
| | 2.0 | Panthenol, Propylene Glycol |
| | 1.0 | Cyclopentasiloxane, Cyclohexasiloxane |
| | 10.0 | Octyldodecanol |
| | 0.5 | PVP |
| | 10.0 | Caprylic/Capric Triglyceride |
| | 3.0 | C12-15 Alkyl Benzoate |
| | 3.0 | Glycerin |
| | 1.0 | Tocopheryl Acetate |
| | 0.3 | Bisabolol |
| | 1.0 | Aqueous solution with about 5% keratin-binding domain- |
| | | reactive dye 14_264 |
| | 59.2 | Alcohol |

Al 5%:

| | | |
|---|---|---|
| A | 3.0 | Ethylhexyl Methoxycinnamate |
| | 2.0 | Diethylamino Hydroxybenzoyl Hexyl Benzoate |
| | 1.0 | Polyquaternium-44 |
| | 3.0 | Propylene Glycol |
| | 2.0 | Panthenol, Propylene Glycol |
| | 1.0 | Cyclopentasiloxane, Cyclohexasiloxane |
| | 10.0 | Octyldodecanol |
| | 0.5 | PVP |
| | 10.0 | Caprylic/Capric Triglyceride |
| | 3.0 | C12-15 Alkyl Benzoate |
| | 3.0 | Glycerin |
| | 1.0 | Tocopheryl Acetate |
| | 0.3 | Bisabolol |
| | 5.0 | Aqueous solution with about 5% keratin-binding domain- |
| | | reactive dye 14_264 |
| | 55.2 | Alcohol |

Preparation: Weigh in the components of phase A and dissolve until clear.

### Example 35

### Use of the KBD in a Skin Care Gel

| | |
|---|---|
| % | Ingredient (INCI) |

Al 1%:

| | | |
|---|---|---|
| A | 3.6 | PEG-40 Hydrogenated Castor Oil |
| | 15.0 | Alcohol |
| | 0.1 | Bisabolol |
| | 0.5 | Tocopheryl Acetate |
| | q.s. | Perfume oil |
| B | 3.0 | Panthenol |
| | 0.6 | Carbomer |
| | 1.0 | Aqueous solution with about 5% keratin-binding domain- |
| | | reactive dye 14_264 |
| | 75.4 | Aqua dem. |
| C | 0.8 | Triethanolamine |

Al 5%:

| | | |
|---|---|---|
| A | 3.6 | PEG-40 Hydrogenated Castor Oil |
| | 15.0 | Alcohol |
| | 0.1 | Bisabolol |
| | 0.5 | Tocopheryl Acetate |
| | q.s. | Perfume oil |
| B | 3.0 | Panthenol |
| | 0.6 | Carbomer |
| | 5.0 | Aqueous solution with about 5% keratin-binding domain- |
| | | reactive dye 14_264 |
| | 71.4 | Aqua dem. |
| C | 0.8 | Triethanolamine |

Preparation: Dissolve phase A until clear. Allow phase B to swell and neutralize with phase C. Stir phase A into the homogenized phase B and homogenize.

### Example 36

### Use of the KBD in an After Shave Lotion

| | |
|---|---|
| % | Ingredient (INCI) |

Al 1%:

| | | |
|---|---|---|
| A | 10.0 | Cetearyl Ethylhexanoate |
| | 5.0 | Tocopheryl Acetate |
| | 1.0 | Bisabolol |
| | 0.1 | Perfume oil |
| | 0.3 | Acrylates/C10-30 Alkyl Acrylate Crosspolymer |
| B | 15.0 | Alcohol |
| | 1.0 | Panthenol |
| | 3.0 | Glycerin |
| | 1.0 | Aqueous solution with about 5% keratin-binding domain- |
| | | reactive dye 14_264 |
| | 0.1 | Triethanolamine |
| | 63.5 | Aqua dem. |

Al 5%:

| | | |
|---|---|---|
| A | 10.0 | Cetearyl Ethylhexanoate |
| | 5.0 | Tocopheryl Acetate |
| | 1.0 | Bisabolol |
| | 0.1 | Perfume oil |
| | 0.3 | Acrylates/C10-30 Alkyl Acrylate Crosspolymer |
| B | 15.0 | Alcohol |
| | 1.0 | Panthenol |
| | 3.0 | Glycerin |
| | 5.0 | Aqueous solution with about 5% keratin-binding domain- |
| | | reactive dye 14_264 |
| | 0.1 | Triethanolamine |
| | 59.5 | Aqua dem. |

Preparation: Mix the components of phase A. Dissolve phase B, incorporate into phase A and homogenize.

### Example 37

### Use of the KBD in an After Sun Lotion

| | |
|---|---|
| % | Ingredient (INCI) |

Al 1%:

| | | |
|---|---|---|
| A | 0.4 | Acrylates/C10-30 Alkyl Acrylate Crosspolymer |
| | 15.0 | Cetearyl Ethylhexanoate |
| | 0.2 | Bisabolol |
| | 1.0 | Tocopheryl Acetate |
| | q.s. | Perfume oil |
| B | 1.0 | Panthenol |
| | 15.0 | Alcohol |
| | 3.0 | Glycerin |
| | 1.0 | Aqueous solution with about 5% keratin-binding domain- |
| | | reactive dye 14_264 |
| | 63.2 | Aqua dem. |
| C | 0.2 | Triethanolamine |

Al 5%:

| | | |
|---|---|---|
| A | 0.4 | Acrylates/C10-30 Alkyl Acrylate Crosspolymer |
| | 15.0 | Cetearyl Ethylhexanoate |
| | 0.2 | Bisabolol |
| | 1.0 | Tocopheryl Acetate |
| | q.s. | Perfume oil |
| B | 1.0 | Panthenol |
| | 15.0 | Alcohol |
| | 3.0 | Glycerin |
| | 5.0 | Aqueous solution with about 5% keratin-binding domain- |
| | | reactive dye 14_264 |
| | 59.2 | Aqua dem. |
| C | 0.2 | Triethanolamine |

Preparation: Mix the components of phase A. Stir phase B into phase A with homogenization. Neutralize with phase C and homogenize again.

### Example 38

### Use of the KBD in a Sunscreen Lotion

| | |
|---|---|
| % | Ingredient (INCI) |

Al 1%:

| | | |
|---|---|---|
| A | 4.5 | Ethylhexyl Methoxycinnamate |
| | 3.0 | Octocrylene |
| | 2.5 | Di-C12-13 Alkyl Malate |
| | 0.5 | Tocopheryl Acetate |
| | 4.0 | Polyglyceryl-3 Methyl Glucose Distearate |
| B | 3.5 | Cetearyl Isononanoate |
| | 1.0 | VP/Eicosene Copolymer |
| | 5.0 | Isohexadecane |
| | 2.5 | Di-C12-13 Alkyl Malate |
| | 3.0 | Titanium Dioxide, Trimethoxycaprylylsilane |
| C | 5.0 | Glycerin |
| | 1.0 | Sodium Cetearyl Sulfate |
| | 0.5 | Xanthan Gum |
| | 61.7 | Aqua dem. |
| D | 1.0 | Aqueous solution with about 5% keratin-binding domain- |
| | | reactive dye 14_264 |
| | 1.0 | Phenoxyethanol, Methylparaben, Ethylparaben, Butylparaben, |
| | | Propyl-paraben, Isobutylparaben |
| | 0.3 | Bisabolol |

Al 5%:

| | | |
|---|---|---|
| A | 4.5 | Ethylhexyl Methoxycinnamate |
| | 3.0 | Octocrylene |
| | 2.5 | Di-C12-13 Alkyl Malate |
| | 0.5 | Tocopheryl Acetate |
| | 4.0 | Polyglyceryl-3 Methyl Glucose Distearate |
| B | 3.5 | Cetearyl Isononanoate |
| | 1.0 | VP/Eicosene Copolymer |
| | 5.0 | Isohexadecane |
| | 2.5 | Di-C12-13 Alkyl Malate |
| | 3.0 | Titanium Dioxide, Trimethoxycaprylylsilane |
| C | 5.0 | Glycerin |
| | 1.0 | Sodium Cetearyl Sulfate |
| | 0.5 | Xanthan Gum |
| | 57.7 | Aqua dem. |
| D | 5.0 | Aqueous solution with about 5% keratin-binding domain- |
| | | reactive dye 14_264 |
| | 1.0 | Phenoxyethanol, Methylparaben, Ethylparaben, Butylparaben, |
| | | Propyl-paraben, Isobutylparaben |
| | 0.3 | Bisabolol |

Preparation: Heat the components of phases A and B separately from one another to about 80° C. Stir phase B into phase A and homogenize. Heat phase C to about 80° C. and stir into the combined phases A and B with homogenization. Cool to about 40° C. with stirring, add phase D and homogenize again.

### Example 39

### Use of the KBD in a Sunscreen Lotion—O/W Type

| | |
|---|---|
| % | Ingredient (INCI) |

Al 1%:

| | | |
|---|---|---|
| A | 2.0 | Ceteareth-6, Stearyl Alcohol |
| | 2.0 | Ceteareth-25 |
| | 3.0 | Tribehenin |
| | 2.0 | Cetearyl Alcohol |
| | 2.0 | Cetearyl Ethylhexanoate |
| | 5.0 | Ethylhexyl Methoxycinnamate |
| | 1.0 | Ethylhexyl Triazone |
| | 1.0 | VP/Eicosene Copolymer |
| | 7.0 | Isopropyl Myristate |
| B | 5.0 | Zinc Oxide, Triethoxycaprylylsilane |
| C | 0.2 | Xanthan Gum |
| | 0.5 | Hydroxyethyl Acrylate/Sodium Acryloyldimethyl Taurate |
| | | Copolymer, Squalane, Polysorbate 60 |
| | 0.2 | Disodium EDTA |
| | 5.0 | Propylene Glycol |
| | 0.5 | Panthenol |
| | 60.9 | Aqua dem. |
| D | 1.0 | Aqueous solution with about 5% keratin-binding domain- |
| | | reactive dye 14_264 |
| | 0.5 | Phenoxyethanol, Methylparaben, Butylparaben, Ethylparaben, |
| | | Propyl-paraben, Isopropylparaben |
| | 1.0 | Tocopheryl Acetate |
| | 0.2 | Bisabolol |

Al 5%:

| | | |
|---|---|---|
| A | 2.0 | Ceteareth-6, Stearyl Alcohol |
| | 2.0 | Ceteareth-25 |
| | 3.0 | Tribehenin |
| | 2.0 | Cetearyl Alcohol |
| | 2.0 | Cetearyl Ethylhexanoate |
| | 5.0 | Ethylhexyl Methoxycinnamate |
| | 1.0 | Ethylhexyl Triazone |
| | 1.0 | VP/Eicosene Copolymer |
| | 7.0 | Isopropyl Myristate |
| B | 5.0 | Zinc Oxide, Triethoxycaprylylsilane |
| C | 0.2 | Xanthan Gum |
| | 0.5 | Hydroxyethyl Acrylate/Sodium Acryloyldimethyl Taurate |
| | | Copolymer, Squalane, Polysorbate 60 |
| | 0.2 | Disodium EDTA |
| | 5.0 | Propylene Glycol |
| | 0.5 | Panthenol |
| | 56.9 | Aqua dem. |
| D | 5.0 | Aqueous solution with about 5% keratin-binding domain- |
| | | reactive dye 14_264 |
| | 0.5 | Phenoxyethanol, Methylparaben, Butylparaben, Ethylparaben, |
| | | Propyl-paraben, Isopropylparaben |
| | 1.0 | Tocopheryl Acetate |
| | 0.2 | Bisabolol |

Preparation: Heat phase A to about 80° C., stir in phase B and homogenize for 3 min. Likewise heat phase C to 80° C. and stir into the combined phases A and B with homogenization. Cool to about 40° C., stir in phase D and homogenize again.

### Example 40

### Use of the KBD in a Sunscreen Lotion—O/W Type

| | |
|---|---|
| % | Ingredient (INCI) |

Al 1%:

| | | |
|---|---|---|
| A | 3.5 | Ceteareth-6, Stearyl Alcohol |
| | 1.5 | Ceteareth-25 |
| | 7.5 | Ethylhexyl Methoxycinnamate |
| | 2.0 | Cyclopentasiloxane, Cyclohexasiloxane |
| | 0.5 | Beeswax |
| | 3.0 | Cetearyl Alcohol |
| | 10.0 | Caprylic/Capric Triglyceride |
| B | 5.0 | Titanium Dioxide, Silica, Methicone, Alumina |
| C | 3.0 | Glycerin |
| | 0.2 | Disodium EDTA |
| | 0.3 | Xanthan Gum |
| | 1.0 | Decyl Glucoside |
| | 2.0 | Panthenol, Propylene Glycol |
| | 56.3 | Aqua dem. |
| D | 1.0 | Aqueous solution with about 5% keratin-binding domain- |
| | | reactive dye 14_264 |
| | 1.0 | Tocopheryl Acetate |
| | 0.2 | Bisabolol |
| | q.s. | Perfume oil |
| | q.s. | Preservative |

Al 5%:

| | | |
|---|---|---|
| A | 3.5 | Ceteareth-6, Stearyl Alcohol |
| | 1.5 | Ceteareth-25 |
| | 7.5 | Ethylhexyl Methoxycinnamate |
| | 2.0 | Cyclopentasiloxane, Cyclohexasiloxane |
| | 0.5 | Beeswax |
| | 3.0 | Cetearyl Alcohol |
| | 10.0 | Caprylic/Capric Triglyceride |
| B | 5.0 | Titanium Dioxide, Silica, Methicone, Alumina |
| C | 3.0 | Glycerin |
| | 0.2 | Disodium EDTA |
| | 0.3 | Xanthan Gum |
| | 1.0 | Decyl Glucoside |
| | 2.0 | Panthenol, Propylene Glycol |
| | 52.3 | Aqua dem. |
| D | 5.0 | Aqueous solution with about 5% keratin-binding domain- |
| | | reactive dye 14_264 |
| | 1.0 | Tocopheryl Acetate |
| | 0.2 | Bisabolol |
| | q.s. | Perfume oil |
| | q.s. | Preservative |

Preparation: Heat phase A to about 80° C., stir in phase B and homogenize for 3 min. Likewise heat phase C to 80° C. and stir into the combined phases A and B with homogenization. Cool to about 40° C., stir in phase D and homogenize again.

### Example 41

### Use of the KBD in a Foot Balsam

| | |
|---|---|
| % | Ingredient (INCI) |

Al 1%:

| | | |
|---|---|---|
| A | 2.0 | Ceteareth-6, Stearyl Alcohol |
| | 2.0 | Ceteareth-25 |
| | 5.0 | Cetearyl Ethylhexanoate |
| | 4.0 | Cetyl Alcohol |
| | 4.0 | Glyceryl Stearate |
| | 5.0 | Mineral Oil |
| | 0.2 | Menthol |
| | 0.5 | Camphor |
| B | 69.3 | Aqua dem. |
| | q.s. | Preservative |
| C | 1.0 | Bisabolol |
| | 1.0 | Tocopheryl Acetate |
| D | 1.0 | Aqueous solution with about 5% keratin-binding domain- |
| | | reactive dye 14_264 |
| | 5.0 | Witch Hazel Extract |

Al 5%:

| | | |
|---|---|---|
| A | 2.0 | Ceteareth-6, Stearyl Alcohol |
| | 2.0 | Ceteareth-25 |
| | 5.0 | Cetearyl Ethylhexanoate |
| | 4.0 | Cetyl Alcohol |
| | 4.0 | Glyceryl Stearate |
| | 5.0 | Mineral Oil |
| | 0.2 | Menthol |
| | 0.5 | Camphor |
| B | 65.3 | Aqua dem. |
| | q.s. | Preservative |
| C | 1.0 | Bisabolol |
| | 1.0 | Tocopheryl Acetate |
| D | 5.0 | Aqueous solution with about 5% keratin-binding domain- |
| | | reactive dye 14_264 |
| | 5.0 | Witch Hazel Extract |

Preparation: Heat the components of phases A and B separately from one another to about 80° C. Stir phase B into phase A with homogenization. Cool to about 40° C. with stirring, add phases C and D and briefly after-homogenize. Cool to room temperature with stirring.

### Example 42

### Use of the KBD in a W/O Emulsion with Bisabolol

| | |
|---|---|
| % | Ingredient (INCI) |

Al 1%:

| | | |
|---|---|---|
| A | 6.0 | PEG-7 Hydrogenated Castor Oil |
| | 8.0 | Cetearyl Ethylhexanoate |
| | 5.0 | Isopropyl Myristate |
| | 15.0 | Mineral Oil |
| | 0.3 | Magnesium Stearate |
| | 0.3 | Aluminum Stearate |
| | 2.0 | PEG-45/Dodecyl Glycol Copolymer |
| B | 5.0 | Glycerin |
| | 0.7 | Magnesium Sulfate |
| | 55.6 | Aqua dem. |
| C | 1.0 | Aqueous solution with about 5% keratin-binding domain- |
| | | reactive dye 14_264 |
| | 0.5 | Tocopheryl Acetate |
| | 0.6 | Bisabolol |

Al 5%:

| | | |
|---|---|---|
| A | 6.0 | PEG-7 Hydrogenated Castor Oil |
| | 8.0 | Cetearyl Ethylhexanoate |
| | 5.0 | Isopropyl Myristate |
| | 15.0 | Mineral Oil |
| | 0.3 | Magnesium Stearate |
| | 0.3 | Aluminum Stearate |
| | 2.0 | PEG-45/Dodecyl Glycol Copolymer |
| B | 5.0 | Glycerin |
| | 0.7 | Magnesium Sulfate |
| | 51.6 | Aqua dem. |
| C | 5.0 | Aqueous solution with about 5% keratin-binding domain- |
| | | reactive dye 14_264 |
| | 0.5 | Tocopheryl Acetate |
| | 0.6 | Bisabolol |

Preparation: Heat phases A and B separately from one another to about 85° C. Stir phase B into phase A and homogenize. Cool to about 40° C. with stirring, add phase C and briefly homogenize again. Cool to room temperature with stirring. List of formulations for patent keratin-binding domain - haircare

### Example 43

### Foam Conditioner with Setting Agent

| | |
|---|---|
| % | Ingredient (INCI) |

Al 1%

| | | |
|---|---|---|
| A | 10.0 | PVP/VA Copolymer |
| | 0.2 | Hydroxyethyl Cetyldimonium Phosphate |
| | 0.2 | Ceteareth-25 |
| | 0.5 | Dimethicone Copolyol |
| | q.s. | Perfume oil |
| | 10.0 | Alcohol |
| | 1.0 | Aqueous solution with about 5% keratin-binding |
| | | domain-reactive dye 14_264 |
| | 68.1 | Aqua dem. |
| | 10.0 | Propane/Butane |

Al 5%

| | | |
|---|---|---|
| A | 10.0 | PVP/VA Copolymer |
| | 0.2 | Hydroxyethyl Cetyldimonium Phosphate |
| | 0.2 | Ceteareth-25 |
| | 0.5 | Dimethicone Copolyol |
| | q.s. | Perfume oil |
| | 10.0 | Alcohol |
| | 5.0 | Aqueous solution with about 5% keratin-binding |
| | | domain-reactive dye 14_264 |
| | 64.1 | Aqua dem. |
| B | 10.0 | Propane/Butane |

Preparation: Weigh the components of phase A together, stir until everything has dissolved and bottle with phase B.

### Example 44

### Hair-Coloring Foam Conditioner

| | |
|---|---|
| % | Ingredient (INCI) |

Al 1%

| | | |
|---|---|---|
| A | 1.0 | Polyquaternium-4 |
| | 0.5 | Hydroxyethyl Cetyldimonium Phosphate |
| | 1.0 | Aqueous solution with about 5% keratin-binding |
| | | domain-reactive dye 14_264 |
| | q.s. | Perfume oil |
| | q.s. | Preservative |
| | 91.5 | Aqua dem. |
| B | 6.0 | Propane/Butane |

Al 5%

| | | |
|---|---|---|
| A | 1.0 | Polyquaternium-4 |
| | 0.5 | Hydroxyethyl Cetyldimonium Phosphate |
| | 5.0 | Aqueous solution with about 5% keratin-binding |
| | | domain-reactive dye 14_264 |
| | q.s. | Perfume oil |
| | q.s. | Preservative |
| | 87.5 | Aqua dem. |
| B | 6.0 | Propane/Butane |

Preparation: Weigh the components of phase A together, stir until everything has dissolved to give a clear solution and bottle with phase B.

### Example 45

### Hair-Coloring Foam Conditioner

| | |
|---|---|
| % | Ingredient (INCI) |

Al 1%

| | | |
|---|---|---|
| A | 1.0 | Polyquaternium-11 |
| | 0.5 | Hydroxyethyl Cetyldimonium Phosphate |
| | 1.0 | Aqueous solution with about 5% keratin-binding |
| | | domain-reactive dye 14_264 |
| | q.s. | Perfume oil |
| | q.s. | Preservative |
| | 91.5 | Aqua dem. |
| B | 6.0 | Propane/Butane |

Al 5%

| | | |
|---|---|---|
| A | 1.0 | Polyquaternium-11 |
| | 0.5 | Hydroxyethyl Cetyldimonium Phosphate |
| | 5.0 | Aqueous solution with about 5% keratin-binding |
| | | domain-reactive dye 14_264 |
| | q.s. | Perfume oil |
| | q.s. | Preservative |
| | 87.5 | Aqua dem. |
| B | 6.0 | Propane/Butane |

Preparation: Weigh the components of phase A together, stir until everything has dissolved to give a clear solution and bottle with phase B.

### Example 46

### Hair-Coloring Styling Foam

| | |
|---|---|
| % | Ingredient (INCI) |

Al 1%

| | | |
|---|---|---|
| A | 0.5 | Laureth-4 |
| | q.s. | Perfume oil |
| B | 77.3 | Aqua dem. |
| | 10.0 | Polyquaternium-28 |
| | 1.0 | Aqueous solution with about 5% keratin-binding |
| | | domain-reactive dye 14_264 |
| | 0.5 | Dimethicone Copolyol |
| | 0.2 | Ceteareth-25 |
| | 0.2 | Panthenol |
| | 0.1 | PEG-25 PABA |
| | 0.2 | Hydroxyethylcellulose |
| C | 10.0 | HFC 152 A |

Al 5%

| | | |
|---|---|---|
| A | 0.5 | Laureth-4 |
| | q.s. | Perfume oil |
| B | 73.3 | Aqua dem. |
| | 10.0 | Polyquaternium-28 |
| | 5.0 | Aqueous solution with about 5% keratin-binding |
| | | domain-reactive dye 14_264 |
| | 0.5 | Dimethicone Copolyol |
| | 0.2 | Ceteareth-25 |
| | 0.2 | Panthenol |
| | 0.1 | PEG-25 PABA |
| | 0.2 | Hydroxyethylcellulose |
| C | 10.0 | HFC 152 A |

Preparation: Mix the components of phase A. Add the components of phase B one after the other and dissolve. Bottle with phase C.

### Example 47

### Hair-Coloring Styling Foam

| | |
|---|---|
| % | Ingredient (INCI) |

Al 1%

| | | |
|---|---|---|
| A | 2.0 | Cocotrimonium Methosulfate |
| | q.s. | Perfume oil |
| B | 78.5 | Aqua dem. |
| | 6.7 | Acrylates Copolymer |
| | 0.6 | AMP |
| | 1.0 | Aqueous solution with about 5% keratin-binding |
| | | domain-reactive dye 14_264 |
| | 0.5 | Dimethicone Copolyol |
| | 0.2 | Ceteareth-25 |
| | 0.2 | Panthenol |
| | 0.1 | PEG-25 PABA |
| | 0.2 | Hydroxyethylcellulose |
| C | 10.0 | HFC 152 A |

Al 5%

| | | |
|---|---|---|
| A | 2.0 | Cocotrimonium Methosulfate |
| | q.s. | Perfume oil |
| B | 74.5 | Aqua dem. |
| | 6.7 | Acrylates Copolymer |
| | 0.6 | AMP |
| | 5.0 | Aqueous solution with about 5% keratin-binding |
| | | domain-reactive dye 14_264 |
| | 0.5 | Dimethicone Copolyol |
| | 0.2 | Ceteareth-25 |
| | 0.2 | Panthenol |
| | 0.1 | PEG-25 PABA |
| | 0.2 | Hydroxyethylcellulose |
| C | 10.0 | HFC 152 A |

Preparation: Mix the components of phase A. Add the components of phase B one after the other and dissolve. Bottle with phase C.

### Example 48

### Hair-Coloring Styling Foam

| | |
|---|---|
| % | Ingredient (INCI) |

Al 1%

| | | |
|---|---|---|
| A | 2.0 | Cocotrimonium Methosulfate |
| | q.s. | Perfume oil |
| B | 7.70 | Polyquaternium-44 |
| | 1.0 | Aqueous solution with about 5% keratin-binding |
| | | domain-reactive dye 14_264 |
| | q.s. | Preservative |
| | 79.3 | Aqua dem. |
| C | 10.0 | Propane/Butane |

Al 5%

| | | |
|---|---|---|
| A | 2.0 | Cocotrimonium Methosulfate |
| | q.s. | Perfume oil |
| B | 7.70 | Polyquaternium-44 |
| | 5.0 | Aqueous solution with about 5% keratin-binding |
| | | domain-reactive dye 14_264 |
| | q.s. | Preservative |
| | 75.3 | Aqua dem. |
| C | 10.0 | Propane/Butane |

Preparation: Mix the components of phase A. Dissolve the components of phase B until clear, then stir phase B into phase A. Adjust the pH to 6-7, bottle with phase C.

### Example 49

### Hair-Coloring Styling Foam

| | |
|---|---|
| % | Ingredient (INCI) |

Al 1%

| | | |
|---|---|---|
| A | 2.00 | Cocotrimonium Methosulfate |
| | q.s. | Perfume oil |
| B | 72.32 | Aqua dem. |
| | 2.00 | VP/Acrylates/Lauryl Methacrylate Copolymer |
| | 0.53 | AMP |
| | 1.00 | Aqueous solution with about 5% keratin-binding |
| | | domain-reactive dye 14_264 |
| | 0.20 | Ceteareth-25 |
| | 0.50 | Panthenol |
| | 0.05 | Benzophenone-4 |
| | 0.20 | Amodimethicone, Cetrimonium Chloride, Trideceth-12 |
| | 15.00 | Alcohol |
| C | 0.20 | Hydroxyethylcellulose |
| D | 6.00 | Propane/Butane |

Al 5%

| | | |
|---|---|---|
| A | 2.00 | Cocotrimonium Methosulfate |
| | q.s. | Perfume oil |
| B | 68.32 | Aqua dem. |
| | 2.00 | VP/Acrylates/Lauryl Methacrylate Copolymer |
| | 0.53 | AMP |
| | 5.00 | Aqueous solution with about 5% keratin-binding |
| | | domain-reactive dye 14_264 |
| | 0.20 | Ceteareth-25 |
| | 0.50 | Panthenol |
| | 0.05 | Benzophenone-4 |
| | 0.20 | Amodimethicone, Cetrimonium Chloride, Trideceth-12 |
| | 15.00 | Alcohol |
| C | 0.20 | Hydroxyethylcellulose |
| D | 6.00 | Propane/Butane |

Preparation: Mix the components of phase A. Add the components of phase B one after the other and dissolve. Allow phase C to swell in the mixture of A and B, then adjust the pH to 6-7. Bottle with phase D.

### Example 50

### Hair-Coloring Styling Foam

| | |
|---|---|
| % | Ingredient (INCI) |

Al 1%

| | | |
|---|---|---|
| A | 2.00 | Cetrimonium Chloride |
| | q.s. | Perfume oil |
| B | 67.85 | Aqua dem. |
| | 7.00 | Polyquaternium-46 |
| | 1.00 | Aqueous solution with about 5% keratin-binding |
| | | domain-reactive dye 14_264 |
| | 0.20 | Ceteareth-25 |
| | 0.50 | Panthenol |
| | 0.05 | Benzophenone-4 |
| | 0.20 | Amodimethicone, Cetrimonium Chloride, Trideceth-12 |
| | 15.00 | Alcohol |
| C | 0.20 | Hydroxyethylcellulose |
| D | 6.00 | Propane/Butane |

Al 5%

| | | |
|---|---|---|
| A | 2.00 | Cetrimonium Chloride |
| | q.s. | Perfume oil |
| B | 63.85 | Aqua dem. |
| | 7.00 | Polyquaternium-46 |
| | 5.00 | Aqueous solution with about 5% keratin-binding |
| | | domain-reactive dye 14_264 |
| | 0.20 | Ceteareth-25 |
| | 0.50 | Panthenol |
| | 0.05 | Benzophenone-4 |
| | 0.20 | Amodimethicone, Cetrimonium Chloride, Trideceth-12 |
| | 15.00 | Alcohol |
| C | 0.20 | Hydroxyethylcellulose |
| D | 6.00 | Propane/Butane |

Preparation: Mix the components of phase A. Add the components of phase B one after the other and dissolve. Allow phase C to swell in the mixture of A and B, then adjust the pH to 6-7. Bottle with phase D.

### Example 51

### Hair-Coloring Styling Foam

| | |
|---|---|
| % | Ingredient (INCI) |

Al 1%

| | | |
|---|---|---|
| A | q.s. | PEG-40 Hydrogenated Castor Oil |
| | q.s. | Perfume oil |
| | 85.5 | Aqua dem. |
| B | 7.0 | Sodium Polystyrene Sulfonate |
| | 1.0 | Aqueous solution with about 5% keratin-binding |
| | | domain-reactive dye 14_264 |
| | 0.5 | Cetrimonium Bromide |
| | q.s. | Preservative |
| C | 6.0 | Propane/Butane |

Al 5%

| | | |
|---|---|---|
| A | q.s. | PEG-40 Hydrogenated Castor Oil |
| | q.s. | Perfume oil |
| | 81.5 | Aqua dem. |
| B | 7.0 | Sodium Polystyrene Sulfonate |
| | 5.0 | Aqueous solution with about 5% keratin-binding |
| | | domain-reactive dye 14_264 |
| | 0.5 | Cetrimonium Bromide |
| | q.s. | Preservative |
| C | 6.0 | Propane/Butane |

Preparation: Solubilize phase A. Weigh phase B into phase A and dissolve until clear. Adjust the pH to 6-7, bottle with phase C.

### Example 52

### Hair-Coloring Styling Foam

| | |
|---|---|
| % | Ingredient (INCI) |

Al 1%

| | | |
|---|---|---|
| A | q.s. | PEG-40 Hydrogenated Castor Oil |
| | q.s. | Perfume oil |
| | 92.0 | Aqua dem. |
| B | 0.5 | Polyquaternium-10 |
| | 1.0 | Aqueous solution with about 5% keratin-binding |
| | | domain-reactive dye 14_264 |
| | 0.5 | Cetrimonium Bromide |
| | q.s. | Preservative |
| C | 6.0 | Propane/Butane |

Al 5%

| | | |
|---|---|---|
| A | q.s. | PEG-40 Hydrogenated Castor Oil |
| | q.s. | Perfume oil |
| | 88.0 | Aqua dem. |
| B | 0.5 | Polyquaternium-10 |
| | 5.0 | Aqueous solution with about 5% keratin-binding |
| | | domain-reactive dye 14_264 |
| | 0.5 | Cetrimonium Bromide |
| | q.s. | Preservative |
| C | 6.0 | Propane/Butane |

Preparation: Solubilize phase A. Weigh phase B into phase A and dissolve until clear. Adjust the pH to 6-7, bottle with phase C.

### Example 53

### Hair-Coloring Styling Foam

| | |
|---|---|
| % | Ingredient (INCI) |

Al 1%

| | | |
|---|---|---|
| A | q.s. | PEG-40 Hydrogenated Castor Oil |
| | q.s. | Perfume oil |
| | 82.5 | Aqua dem. |
| B | 10.0 | Polyquaternium-16 |
| | 1.0 | Aqueous solution with about 5% keratin-binding |
| | | domain-reactive dye 14_264 |
| | 0.5 | Hydroxyethyl Cetyldimonium Phosphate |
| | q.s. | Preservative |
| C | 6.0 | Propane/Butane |

Al 5%

| | | |
|---|---|---|
| A | q.s. | PEG-40 Hydrogenated Castor Oil |
| | q.s. | Perfume oil |
| | 78.5 | Aqua dem. |
| B | 10.0 | Polyquaternium-16 |
| | 5.0 | Aqueous solution with about 5% keratin-binding |
| | | domain-reactive dye 14_264 |
| | 0.5 | Hydroxyethyl Cetyldimonium Phosphate |
| | q.s. | Preservative |
| C | 6.0 | Propane/Butane |

Preparation: Solubilize phase A. Weigh phase B into phase A and dissolve until clear. Adjust the pH to 6-7, bottle with phase C.

### Example 54

### Hair-Tinting Styling Foam

| | |
|---|---|
| % | Ingredient (INCI) |

Al 1%

| | | |
|---|---|---|
| A | 2.0 | Cocotrimonium Methosulfate |
| | q.s. | Perfume oil |
| B | 84.0 | Aqua dem. |
| | 2.0 | Chitosan |
| | 1.0 | Aqueous solution with about 5% keratin-binding |
| | | domain-reactive dye 14_264 |
| | 0.5 | Dimethicone Copolyol |
| | 0.2 | Ceteareth-25 |
| | 0.2 | Panthenol |
| | 0.1 | PEG-25 PABA |
| C | 10.0 | HFC 152 A |

Al 5%

| | | |
|---|---|---|
| A | 2.0 | Cocotrimonium Methosulfate |
| | q.s. | Perfume oil |
| B | 80.0 | Aqua dem. |
| | 2.0 | Chitosan |
| | 5.0 | Aqueous solution with about 5% keratin-binding |
| | | domain-reactive dye 14_264 |
| | 0.5 | Dimethicone Copolyol |
| | 0.2 | Ceteareth-25 |
| | 0.2 | Panthenol |
| | 0.1 | PEG-25 PABA |
| C | 10.0 | HFC 152 A |

Preparation: Mix the components of phase A. Add the components of phase B one after the other and dissolve. Bottle with phase C.

### Example 55

### Care Shampoo

| | |
|---|---|
| % | Ingredient (INCI) |

Al 1%

| | | |
|---|---|---|
| A | 30.0 | Sodium Laureth Sulfate |
| | 6.0 | Sodium Cocoamphoacetate |
| | 6.0 | Cocamidopropyl Betaine |
| | 3.0 | Sodium Laureth Sulfate, Glycol Distearate, |
| | | Cocamide MEA, Laureth-10 |
| | 1.0 | Aqueous solution with about 5% keratin-binding |
| | | domain-reactive dye 14_264 |
| | 7.7 | Polyquaternium-44 |
| | 2.0 | Amodimethicone |
| | q.s. | Perfume oil |
| | q.s. | Preservative |
| | 1.0 | Sodium Chloride |
| | 43.3 | Aqua dem. |
| B | q.s. | Citric Acid |

Al 5%

| | | |
|---|---|---|
| A | 30.0 | Sodium Laureth Sulfate |
| | 6.0 | Sodium Cocoamphoacetate |
| | 6.0 | Cocamidopropyl Betaine |
| | 3.0 | Sodium Laureth Sulfate, Glycol Distearate, |
| | | Cocamide MEA, Laureth-10 |
| | 5.0 | Aqueous solution with about 5% keratin-binding |
| | | domain-reactive dye 14_264 |
| | 7.7 | Polyquaternium-44 |
| | 2.0 | Amodimethicone |
| | q.s. | Perfume oil |
| | q.s. | Preservative |
| | 1.0 | Sodium Chloride |
| | 39.3 | Aqua dem. |
| B | q.s. | Citric Acid |

Preparation: Mix the components of phase A and dissolve. Adjust the pH to 6-7 with citric acid.

### Example 56

### Shower Gel

| | |
|---|---|
| % | Ingredient (INCI) |

Al 1%

| | | |
|---|---|---|
| A | 40.0 | Sodium Laureth Sulfate |
| | 5.0 | Decyl Glucoside |
| | 5.0 | Cocamidopropyl Betaine |
| | 1.0 | Aqueous solution with about 5% keratin-binding |
| | | domain-reactive dye 14_264 |
| | 1.0 | Panthenol |
| | q.s. | Perfume oil |
| | q.s. | Preservative |
| | 2.0 | Sodium Chloride |
| | 46.0 | Aqua dem. |
| B | q.s. | Citric Acid |

Al 5%

| | | |
|---|---|---|
| A | 40.0 | Sodium Laureth Sulfate |
| | 5.0 | Decyl Glucoside |
| | 5.0 | Cocamidopropyl Betaine |
| | 5.0 | Aqueous solution with about 5% keratin-binding |
| | | domain-reactive dye 14_264 |
| | 1.0 | Panthenol |
| | q.s. | Perfume oil |
| | q.s. | Preservative |
| | 2.0 | Sodium Chloride |
| | 42.0 | Aqua dem. |
| B | q.s. | Citric Acid |

Preparation: Mix the components of phase A and dissolve. Adjust the pH to 6-7 with citric acid.

### Example 57

### Shampoo

| | |
|---|---|
| % | Ingredient (INCI) |

Al 1%

| | | |
|---|---|---|
| A | 40.0 | Sodium Laureth Sulfate |
| | 5.0 | Sodium C12-15 Pareth-15 Sulfonate |
| | 5.0 | Decyl Glucoside |
| | q.s. | Perfume oil |
| | 0.1 | Phytantriol |
| | 44.6 | Aqua dem. |
| | 1.0 | Aqueous solution with about 5% keratin-binding |
| | | domain-reactive dye 14_264 |
| | 0.3 | Polyquaternium-10 |
| | 1.0 | Panthenol |
| | q.s. | Preservative |
| | 1.0 | Laureth-3 |
| | 2.0 | Sodium Chloride |

Al 5%

| | | |
|---|---|---|
| A | 40.0 | Sodium Laureth Sulfate |
| | 5.0 | Sodium C12-15 Pareth-15 Sulfonate |
| | 5.0 | Decyl Glucoside |
| | q.s. | Perfume oil |
| | 0.1 | Phytantriol |
| | 40.6 | Aqua dem. |
| | 5.0 | Aqueous solution with about 5% keratin-binding |
| | | domain-reactive dye 14_264 |
| | 0.3 | Polyquaternium-10 |
| | 1.0 | Panthenol |
| | q.s. | Preservative |
| | 1.0 | Laureth-3 |
| | 2.0 | Sodium Chloride |

Preparation: Mix the components of phase A and dissolve. Adjust the pH to 6-7 with citric acid.

### Example 58

### Hair-Coloring Shampoo

| | |
|---|---|
| % | Ingredient (INCI) |

Al 1%

| | | |
|---|---|---|
| A | 15.00 | Cocamidopropyl Betaine |
| | 10.00 | Disodium Cocoamphodiacetate |
| | 5.00 | Polysorbate 20 |
| | 5.00 | Decyl Glucoside |
| | q.s. | Perfume oil |
| | q.s. | Preservative |
| | 1.00 | Aqueous solution with about 5% keratin-binding |
| | | domain-reactive dye 14_264 |
| | 0.15 | Guar Hydroxypropyltrimonium Chloride |
| | 2.00 | Laureth-3 |
| | 58.00 | Aqua dem. |
| | q.s. | Citric Acid |
| B | 3.00 | PEG-150 Distearate |

Al 5%

| | | |
|---|---|---|
| A | 15.00 | Cocamidopropyl Betaine |
| | 10.00 | Disodium Cocoamphodiacetate |
| | 5.00 | Polysorbate 20 |
| | 5.00 | Decyl Glucoside |
| | q.s. | Perfume oil |
| | q.s. | Preservative |
| | 5.00 | Aqueous solution with about 5% keratin-binding |
| | | domain-reactive dye 14_264 |
| | 0.15 | Guar Hydroxypropyltrimonium Chloride |
| | 2.00 | Laureth-3 |
| | 54.00 | Aqua dem. |
| | q.s. | Citric Acid |
| B | 3.00 | PEG-150 Distearate |

Preparation: Weigh in the components of phase A and dissolve. Adjust the pH to 6-7. Add phase B and heat to about 40° C. Cool to room temperature with stirring.

### Example 59

### Moisturizing Bodycare Cream

| | |
|---|---|
| % | Ingredient (INCI) |

Al 1%

| | | |
|---|---|---|
| A | 2.0 | Ceteareth-25 |
| | 2.0 | Ceteareth-6, Stearyl Alcohol |
| | 3.0 | Cetearyl Ethylhexanoate |
| | 1.0 | Dimethicone |
| | 4.0 | Cetearyl Alcohol |
| | 3.0 | Glyceryl Stearate SE |
| | 5.0 | Mineral Oil |
| | 4.0 | Simmondsia Chinensis (Jojoba) Seed Oil |
| | 3.0 | Mineral Oil, Lanolin Alcohol |
| B | 5.0 | Propylene Glycol |
| | 1.0 | Panthenol |
| | 0.5 | Magnesium Aluminum Silicate |
| | q.s | Preservative |
| | 65.5 | Aqua dem. |
| C | q.s. | Perfume oil |
| | 1.0 | Aqueous solution with about 5% keratin-binding |
| | | domain-reactive dye 14_264 |
| D | q.s. | Citric Acid |

Al 5%

| | | |
|---|---|---|
| A | 2.0 | Ceteareth-25 |
| | 2.0 | Ceteareth-6, Stearyl Alcohol |
| | 3.0 | Cetearyl Ethylhexanoate |
| | 1.0 | Dimethicone |
| | 4.0 | Cetearyl Alcohol |
| | 3.0 | Glyceryl Stearate SE |
| | 5.0 | Mineral Oil |
| | 4.0 | Simmondsia Chinensis (Jojoba) Seed Oil |
| | 3.0 | Mineral Oil, Lanolin Alcohol |
| | 1.0 | Panthenol |
| B | 5.0 | Propylene Glycol |
| | 0.5 | Magnesium Aluminum Silicate |
| | q.s | Preservative |
| | 61.5 | Aqua dem. |
| C | q.s. | Perfume oil |
| | 5.0 | Aqueous solution with about 5% keratin-binding |
| | | domain-reactive dye 14_264 |
| D | q.s. | Citric Acid |

Preparation: Heat phases A and B separately to about 80° C. Briefly prehomogenize phase B, then stir phase B into phase A and homogenize again. Cool to about 40° C., add phase C and homogenize thoroughly again. Adjust the pH to 6-7 with citric acid.

### Example 60

### Moisturizing Bodycare Cream

| | |
|---|---|
| % | Ingredient (INCI) |

Al 1%

| | | |
|---|---|---|
| A | 6.0 | PEG-7 Hydrogenated Castor Oil |
| | 10.0 | Cetearyl Ethylhexanoate |
| | 5.0 | Isopropyl Myristate |
| | 7.0 | Mineral Oil |
| | 0.5 | Shea Butter (Butyrospermum Parkii) |
| | 0.5 | Aluminum Stearate |
| | 0.5 | Magnesium Stearate |
| | 0.2 | Bisabolol |
| | 0.7 | Quaternium-18-Hectorite |
| B | 5.0 | Dipropylene Glycol |
| | 0.7 | Magnesium Sulfate |
| | q.s. | Preservative |
| | 62.9 | Aqua dem. |
| C | q.s. | Perfume oil |
| | 1.0 | Aqueous solution with about 5% keratin-binding |
| | | domain-reactive dye 14_264 |

Al 5%

| | | |
|---|---|---|
| A | 6.0 | PEG-7 Hydrogenated Castor Oil |
| | 10.0 | Cetearyl Ethylhexanoate |
| | 5.0 | Isopropyl Myristate |
| | 7.0 | Mineral Oil |
| | 0.5 | Shea Butter (Butyrospermum Parkii) |
| | 0.5 | Aluminum Stearate |
| | 0.5 | Magnesium Stearate |
| | 0.2 | Bisabolol |
| | 0.7 | Quaternium-18-Hectorite |
| B | 5.0 | Dipropylene Glycol |
| | 0.7 | Magnesium Sulfate |
| | q.s. | Preservative |
| | 58.9 | Aqua dem. |
| C | q.s. | Perfume oil |
| | 5.0 | Aqueous solution with about 5% keratin-binding |
| | | domain-reactive dye 14_264 |

Preparation: Heat phases A and B separately to about 80° C. Stir phase B into phase A and homogenize. Cool to about 40° C. with stirring, add phase C and homogenize again. Allow to cool to room temperature with stirring.

### Example 61

### Liquid Make-Up—O/W Type

| | |
|---|---|
| % | Ingredient (INCI) |

Al 1%

| | | |
|---|---|---|
| A | 2.0 | Ceteareth-6, Stearyl Alcohol |
| | 2.0 | Ceteareth-25 |
| | 6.0 | Glyceryl Stearate |
| | 1.0 | Cetyl Alcohol |
| | 8.0 | Mineral Oil |
| | 7.0 | Cetearyl Ethylhexanoate |
| | 0.2 | Dimethicone |
| B | 3.0 | Propylene Glycol |
| | 1.0 | Panthenol |
| | q.s. | Preservative |
| | 61.9 | Aqua dem. |
| C | 0.1 | Bisabolol |
| | 1.0 | Aqueous solution with about 5% keratin-binding |
| | | domain-reactive dye 14_264 |
| | q.s. | Perfume oil |
| D | 5.7 | C.I. 77 891, Titanium Dioxide |
| | 1.1 | Iron Oxides |

Al 5%

| | | |
|---|---|---|
| A | 2.0 | Ceteareth-6, Stearyl Alcohol |
| | 2.0 | Ceteareth-25 |
| | 6.0 | Glyceryl Stearate |
| | 1.0 | Cetyl Alcohol |
| | 8.0 | Mineral Oil |
| | 7.0 | Cetearyl Ethylhexanoate |
| | 0.2 | Dimethicone |
| B | 3.0 | Propylene Glycol |
| | 1.0 | Panthenol |
| | q.s. | Preservative |
| | 57.9 | Aqua dem. |
| C | 0.1 | Bisabolol |
| | 5.0 | Aqueous solution with about 5% keratin-binding |
| | | domain-reactive dye 14_264 |
| | q.s. | Perfume oil |
| D | 5.7 | C.I. 77 891, Titanium Dioxide |
| | 1.1 | Iron Oxides |

Preparation: Heat phases A and B separately to about 80° C. Stir phase B into phase A and homogenize. Cool to about 40° C. with stirring, add phases C and D and thoroughly homogenize again. Allow to cool to room temperature with stirring.

### Example 62

[0594] The specified keratin-binding domain-reactive dye 14_{—}264 is used as an approximately 5% strength by weight aqueous solution. The following data are parts by weight.

[0595] Clear Hair Coloring Shampoo

| Ingredients (INCI) | 1 | 2 | 3 | 4 | 5 |
|---|---|---|---|---|---|
| Sodium Laureth Sulfate | — | 15.00 | 10.50 | 12.50 | — |
| Codamidopropyl Betaine | 7.50 | 7.00 | 5.00 | 5.50 | 10.00 |
| PEG-7 Glyceryl Cocoate | 2.00 | 2.50 | 3.50 | 5.00 | 2.30 |
| Perfume oil | 0.10 | 0.10 | 0.10 | 0.10 | 0.10 |
| Keratin-binding domain- | 1.0 | 5.0 | 0.1 | 0.5 | 10.0 |
| reactive dye 14_264 | | | | | |
| D-Panthenol USP | 1.00 | 1.50 | 1.80 | 1.70 | 1.40 |
| Preservative | 0.10 | 0.10 | 0.10 | 0.10 | 0.10 |
| Citric Acid | 0.10 | 0.10 | 0.10 | 0.10 | 0.10 |
| Luviquat ® Ultra Care | 1.50 | 1.00 | 1.50 | 1.20 | 1.10 |
| Sodium Chloride | 1.50 | 1.40 | 1.40 | 1.30 | 1.50 |
| Aqua dem. | ad 100 | ad 100 | ad 100 | ad 100 | ad 100 |

[0596] Hair-Coloring Shampoo

| Ingredients (INCI) | 1 | 2 | 3 | 4 | 5 |
|---|---|---|---|---|---|
| Sodium Laureth Sulfate | 35.00 | −0 | 5.00 | 1.00 | — |
| Decyl Glucoside | 5.00 | 5.50 | 4.90 | 3.50 | 7.00 |
| Cocamidopropyl Betaine | 10.00 | 5.00 | 12.50 | 7.50 | 15.00 |
| Perfume oil | 0.10 | 0.10 | 0.10 | 0.10 | 0.10 |
| Keratin-binding domain- | 1.0 | 5.0 | 0.1 | 20.0 | 5.0 |
| reactive dye 14_264 | | | | | |
| D-Panthenol USP | 0.50 | 1.00 | 0.80 | 1.50 | 0.50 |
| Preservative | 0.10 | 0.10 | 0.10 | 0.10 | 0.10 |
| Citric Acid | 0.10 | 0.10 | 0.10 | 0.10 | 0.10 |
| Laureth-3 | 0.50 | 2.00 | 0.50 | 0.50 | 2.00 |
| Sodium Chloride | 1.50 | 1.50 | 1.50 | 1.50 | 1.50 |
| Aqua dem. | ad 100 | ad 100 | ad 100 | ad 100 | ad 100 |

[0597] Clear Conditioner Shampoo for Hair Coloring

| Ingredients (INCI) | 1 | 2 | 3 | 4 | 5 |
|---|---|---|---|---|---|
| ® Disodium | 10.00 | 15.00 | 20.00 | 12.00 | 17.00 |
| Cocoamphodiacetate | | | | | |
| ® Decyl Glucoside | 5.00 | 6.00 | 7.00 | 8.00 | 4.00 |
| ® Cocamidopropyl | 15.00 | 12.00 | 10.00 | 18.00 | 20.00 |
| Betaine | | | | | |
| Luviquat ® FC 550 | 0.30 | 0.20 | 0.20 | 0.20 | 0.30 |
| Perfume oil | 0.10 | 0.10 | 0.10 | 0.10 | 0.10 |
| Keratin-binding domain- | 20.0 | 5.0 | 1.0 | 0.5 | 10.0 |
| reactive dye 14_264 | | | | | |
| Cremophor ® PS 20 | 5.00 | 1.00 | 1.00 | 7.00 | 5.00 |
| Preservative | 0.10 | 0.10 | 0.10 | 0.10 | 0.10 |
| Laureth-3 | — | 1.00 | 0.50 | 2.00 | — |
| Citric Acid | 0.20 | 0.20 | 0.20 | 0.20 | 0.20 |
| PEG-12 Distearate | 3.00 | 2.00 | 2.00 | 3.00 | 2.50 |
| Aqua dem. | ad 100 | ad 100 | ad 100 | ad 100 | ad 100 |

[0598] Hair-Tinting Foam O/W Emulsions

| | Emulsion 1 | % by | Emulsion 2 | % by |
|---|---|---|---|---|
| | % by wt. | vol. | % by wt. | vol. |
| Stearic Acid | 5.00 | | 1.00 | |
| Cetyl Alcohol | 5.50 | | | |
| Cetearyl Alcohol | | | 2.00 | |
| PEG-40 Stearate | 8.50 | | | |
| PEG-20 Stearate | | | 1.00 | |
| Caprylic/Capric Triglyceride | 4.00 | | 2.00 | |
| C12-15 Alkyl Benzoate | 10.00 | | 15.00 | |
| Cyclomethicone | 4.00 | | | |
| Dimethicone | | | 0.50 | |
| Keratin-binding domain- | 5.0 | | 10.0 | |
| reactive dye 14_264 | | | | |
| Ethylhexyl Isostearate | | | 5.00 | |
| Myristyl Myristate | | | 2.00 | |
| Ceresin | 1.50 | | | |
| Glycerin | | | 3.00 | |
| Hydroxypropyl Starch | 1.00 | | 3.50 | |
| Phosphate | | | | |
| BHT | | | 0.02 | |
| Disodium EDTA | 0.50 | | 0.10 | |
| Perfume oil, Preservative | q.s. | | q.s. | |
| Potassium Hydroxide | q.s. | | q.s. | |
| Aqua dem. | ad 100 | | ad 100 | |
| | adjust pH | | adjust pH | |
| | to 6.5-7.5 | | to 5.0-6.0 | |
| Emulsion 1 | | 70 | | |
| Emulsion 2 | | | | 35 |
| Nitrogen | | 30 | | |
| Propane/Butane | | | | 65 |

[0599] Hair-Coloring Conditioner Shampoo with Pearlescence

| | 1 | 2 | 3 |
|---|---|---|---|
| Polyquaternium-10 | 0.50 | 0.50 | 0.40 |
| Sodium Laureth Sulfate | 9.00 | 8.50 | 8.90 |
| Cocamidopropyl Betaine | 2.50 | 2.60 | 3.00 |
| Uvinul ® MS 40 | 1.50 | 0.50 | 1.00 |
| Keratin-binding domain-reactive dye | 1.0 | 5.0 | 0.5 |
| 14_264 | | | |
| Pearlescent solution | 2.00 | 2.50 | |
| Disodium EDTA | 0.10 | 0.15 | 0.05 |
| Preservative, Perfume oil, Thickener | q.s. | q.s. | q.s. |
| Aqua dem. | ad 100 | ad 100 | ad 100 |

adjust pH to 6.0

[0600] Clear Hair-Coloring Conditioner Shampoo

| | 1 | 2 | 3 |
|---|---|---|---|
| Polyquaternium-10 | 0.50 | 0.50 | 0.50 |
| Sodium Laureth Sulfate | 0.2 | — | 0.1 |
| Keratin-binding domain-reactive dye | 5.0 | 10.0 | 20.0 |
| 14_264 | | | |
| Uvinul ® M 40 | 1.00 | 1.50 | 0.50 |
| Preservative, Perfume oil, Thickener | q.s. | q.s. | q.s. |
| Aqua dem. | ad 100 | ad 100 | ad 100 |

adjust pH to 6.0

[0601] Clear Conditioner Shampoo with Volume Effect for Hair Coloring

| | 1 | 2 | 3 |
|---|---|---|---|
| Sodium Laureth Sulfate | — | 0.5 | 1.00 |
| Uvinul ® MC 80 | 2.00 | 1.50 | 2.30 |
| Keratin-binding domain-reactive dye | 10.0 | 15.0 | 5.0 |
| 14_264 | | | |
| Cocamidopropyl Betaine | 2.50 | 2.60 | 2.20 |
| Disodium EDTA | 0.01 | 0.10 | 0.01 |
| Preservative, Perfume oil, Thickener | q.s. | q.s. | q.s. |
| Aqua dem. | ad 100 | ad 100 | ad 100 |

adjust pH to 6.0

[0602] Hair-Tinting Gel Cream

| | 1 | 2 | 3 | 4 |
|---|---|---|---|---|
| Acrylates/C10-30 Alkylacrylate | 0.40 | 0.35 | 0.40 | 0.35 |
| Crosspolymer | | | | |
| Carbomer | 0.20 | 0.22 | 0.20 | 0.22 |
| Xanthan Gum | 0.10 | 0.13 | 0.10 | 0.13 |
| Cetearyl Alcohol | 3.00 | 2.50 | 3.00 | 2.50 |
| C12-15 Alkyl Benzoate | 4.00 | 4.50 | 4.00 | 4.50 |
| Caprylic/Capric Triglyceride | 3.00 | 3.50 | 3.00 | 3.50 |
| Uvinul ® A Plus ™ | 2.00 | 1.50 | 0.75 | 1.00 |
| UvaSorb ® k2A | | 3.00 | | |
| Ethylhexyl Bis- | | | | |
| Isopentylbenzoxazolylphenyl | | | | |
| Melamine | | | | |
| Uinul ® MC 80 | 3.00 | | 1.00 | |
| Bis-Ethylhexyloxyphenol | | 1.50 | | 2.00 |
| Methoxyphenyl Triazine | | | | |
| Butyl Methoxydibenzoylmethane | | | 2.00 | |
| Disodium Phenyl | 2.50 | | 0.50 | 2.00 |
| Dibenzimidazole Tetrasulfonate | | | | |
| Uvinul ® T 150 | 4.00 | | 3.00 | 4.00 |
| Uvinul ® N 539 T | | 4.00 | | |
| Diethylhexyl Butamido Triazone | 1.00 | | | 2.00 |
| Phenylbenzimidazole | 0.50 | | 3.00 | |
| Sulfonic Acid | | | | |
| Methylene Bis-Benzotriazolyl | 2.00 | | 0.50 | 1.50 |
| Tetramethylbutylphenol | | | | |
| Ethylhexyl Salicylate | | | 3.00 | |
| Drometrizole Trisiloxane | | | 0.50 | |
| Terephthalidene Dicamphor | | 1.50 | | 1.00 |
| Sulfonic Acid | | | | |
| Diethylhexyl 2,6-Naphthalate | 3.50 | 4.00 | 7.00 | 9.00 |
| Titanium Dioxide-microfine | 1.00 | | 3.00 | |
| Zinc Oxide-microfine | | | | 0.25 |
| Keratin-binding domain-reactive | 5.0 | 20.0 | 1.0 | 10.0 |
| dye 14_264 | | | | |
| Cyclomethicone | 5.00 | 5.50 | 5.00 | 5.50 |
| Dimethicone | 1.00 | 0.60 | 1.00 | 0.60 |
| Glycerin | 1.00 | 1.20 | 1.00 | 1.20 |
| Sodium Hydroxide | q.s. | q.s. | q.s. | q.s. |
| Preservative | 0.30 | 0.23 | 0.30 | 0.23 |
| Perfume oil | 0.20 | | 0.20 | |
| Aqua dem. | ad 100 | ad 100 | ad 100 | ad 100 |
| adjust pH to 6.0 | | | | |

[0603] OW Sunscreen Formulation

| | 1 | 2 | 3 | 4 | 5 | 6 | 7 |
|---|---|---|---|---|---|---|---|
| Glyceryl Stearate SE | 0.50 | 1.00 | 3.00 | | | 1.50 | |
| Glyceryl Stearate Citrate | 2.00 | | 1.00 | 2.00 | 4.00 | | |
| Stearic Acid | | 3.00 | | 2.00 | | | |
| PEG-40 Stearate | 0.50 | | | | | 2.00 | |
| Cetyl Phosphate | | | | | | 1.00 | |
| Sodium Cetearyl Sulfate | | | | | | | 0.75 |
| Stearyl Alcohol | | | 3.00 | | | 2.00 | 0.60 |
| Cetyl Alcohol | 2.50 | 1.10 | | 1.50 | 0.60 | | 2.00 |
| Keratin-binding domain-reactive | 10.0 | 0.5 | 3.0 | 5.0 | 0.1 | 15.0 | 7.5 |
| dye 14_264 | | | | | | | |
| UvaSorb ® k2A | | | | | | | |
| Ethylhexyl Bis- | | | | | | | |
| Isopentylbenzoxazolylphenyl | | | | | | | |
| Melamine | | | | | | | |
| Ethylhexyl Methoxycinnamate | | | | | 5.00 | 6.00 | 8.00 |
| Uvinul ® MC 80 | | | | | | | |
| Bis-Ethylhexyloxyphenol | | 1.50 | | 2.00 | 2.50 | | 2.50 |
| Methoxyphenyl Triazine | | | | | | | |
| Butyl Methoxydlbenzoylmethane | | | 2.00 | | 2.00 | 1.50 | |
| Disodium Phenyl Dibenzimidazole | 2.50 | | 0.50 | 2.00 | | 0.30 | |
| Tetrasulfonate | | | | | | | |
| Ethylhexyl Triazone Uvinul ® T 150 | 4.00 | | 3.00 | 4.00 | | 2.00 | |
| Octocrylene | | 4.00 | | | | | 7.50 |
| Uvinul ® N 539 T | | | | | | | |
| Diethylhexyl Butamido Triazone | 1.00 | | | 2.00 | 1.00 | | 1.00 |
| Phenylbenzimidazole Sulfonic Acid | 0.50 | | 3.00 | | | | |
| Methylene Bis-Benzotriazolyl | 2.00 | | 0.50 | 1.50 | 2.50 | | |
| Tetramethylbutylphenol | | | | | | | |
| Ethylhexyl Salicylate | | | 3.00 | | | | 5.00 |
| Drometrizole Trisiloxane | | | 0.50 | | | 1.00 | |
| Terephthalidene Dicamphor | | 1.50 | | 1.00 | 1.00 | | 0.50 |
| Sulfonic Acid | | | | | | | |
| Diethylhexyl 2,6-Naphthalate | 3.50 | | 7.00 | | 6.00 | 9.00 | |
| Titanium Dioxide-microfine | 1.00 | | 3.00 | | 3.50 | | 1.50 |
| Zinc Oxide-microfine | | | | 0.25 | | 2.00 | |
| C12-15 Alkyl Benzoate | | 0.25 | | | 4.00 | 7.00 | |
| Dicapryl Ether | | | 3.50 | | 2.00 | | |
| Butylene Glycol | 5.00 | | 6.00 | | | | |
| Dicaprylate/Dicaprate | | | | | | | |
| Cocoglyceride | | | 6.00 | | 2.00 | | |
| Dimethicone | 0.50 | | 1.00 | | 2.00 | | |
| Cyclomethicone | 2.00 | | 0.50 | | 0.50 | | |
| Butyrospermum Parkii (Shea | | 2.00 | | | | | |
| Butter) | | | | | | | |
| VP/Hexadecene Copolymer | 0.20 | | | 0.50 | | 1.00 | |
| Glycerin | 3.00 | 7.50 | | 7.50 | 5.00 | | 2.50 |
| Xanthan Gum | 0.15 | | 0.05 | | | 0.30 | |
| Sodium Carbomer | | 0.20 | | 0.15 | 0.25 | | |
| Vitamin E Acetate | 0.60 | | 0.23 | | 0.70 | 1.00 | |
| Biosaccharide Gum-1 | | 3.00 | 10.00 | | | | |
| Glycine Soja (Soybean) Oil | | | | 0.50 | | 1.50 | 1.00 |
| Ethylhexylglycerin | 0.30 | | | | | | |
| DMDM Hydantoin | | 0.60 | 0.40 | 0.20 | | | |
| Iodopropynyl Butylcarbamate | | | | 0.18 | 0.20 | | |
| Methylparaben | 0.15 | | 0.25 | | 0.50 | | |
| Phenoxyethanol | 1.00 | 0.40 | | | 0.40 | 0.50 | 0.40 |
| Trisodium EDTA | 0.02 | | 0.05 | | | | |
| Tetrasodium Iminodisuccinate | | | | 0.25 | 1.00 | | |
| Ethanol | 2.00 | 1.50 | | 3.00 | | 1.20 | 5.00 |
| Perfume oil | 0.10 | 0.25 | 0.30 | | 0.40 | 0.20 | |
| Aqua dem. | ad 100 | ad 100 | ad 100 | ad 100 | ad 100 | ad100 | ad 100 |

[0604] Hydrodispersion

| | 1 | 2 | 3 | 4 | 5 |
|---|---|---|---|---|---|
| Ceteaereth-20 | 1.00 | | | 0.50 | |
| Cetyl Alcohol | | | 1.00 | | |
| Sodium Carbomer | | 0.20 | | 0.30 | |
| Acrylates/C10-30 Alkyl Acrylate | 0.50 | | 0.40 | 0.10 | 0.50 |
| Crosspolymer | | | | | |
| Xanthan Gum | | 0.30 | 0.15 | | |
| Keratin-binding domain-reactive dye | 5.0 | 0.5 | 3.0 | 0.1 | 10.0 |
| 14_264 | | | | | |
| UvaSorb ® k2A Ethylhexyl Bis- | | 3.50 | | | |
| Isopentylbenzoxazolylphenyl Melamine | | | | | |
| Ethylhexyl Methoxycinnamate Uvinul ® MC 80 | | | | | 5.00 |
| Bis-Ethylhexyloxyphenol Methoxyphenyl | | 1.50 | | 2.00 | 2.50 |
| Triazine | | | | | |
| Butyl Methoxydibenzoylmethane | | | 2.00 | | 2.00 |
| Disodium Phenyl Dibenzimidazole | 2.50 | | 0.50 | 2.00 | |
| Tetrasulfonate | | | | | |
| Ethylhexyl Triazone Uvinul ® T 150 | 4.00 | | 3.00 | 4.00 | |
| Octocrylene | | 4.00 | | | |
| Uvinul ® N 539 T | | | | | |
| Diethylhexyl Butamido Triazone | 1.00 | | | 2.00 | 1.00 |
| Phenylbenzimidazole Sulfonic Acid | 0.50 | | 3.00 | | |
| Methylene Bis-Benzotriazolyl | 2.00 | | 0.50 | 1.50 | 2.50 |
| Tetramethylbutylphenol | | | | | |
| Ethylhexyl Salicylate | | | 3.00 | | |
| Drometrizole Trisiloxane | | | 0.50 | | |
| Terephthalidene Dicamphor Sulfonic Acid | | 1.50 | | 1.00 | 1.00 |
| Diethylhexyl 2,6-Naphthalate | | | 7.00 | | 9.00 |
| Titanium Dioxide-microfine | 1.00 | | 3.00 | | 3.50 |
| Zinc Oxide-microfine | | | | 0.25 | |
| C12-15 Alkyl Benzoate | 2.00 | 2.50 | | | |
| Dicapryl Ether | | 4.00 | | | |
| Butylene Glycol Dicaprylate/Dicaprate | 4.00 | | 2.00 | 6.00 | |
| Dicapryl Carbonate | | 2.00 | 6.00 | | |
| Dimethicone | | 0.50 | 1.00 | | |
| Phenyl Trimethicone | 2.00 | | 0.50 | | |
| Butyrospermum Parkii (Shea Butter) | | 2.00 | | 5.00 | |
| VP/Hexadecene Copolymer | 0.50 | | | 0.50 | 1.00 |
| Tricontanyl PVP | 0.50 | | 1.00 | | |
| Ethylhexylglycerin | | | 1.00 | | 0.80 |
| Glycerin | 3.00 | 7.50 | | 7.50 | 8.50 |
| Glycine Soja (Soybean) Oil | | | 1.50 | | 1.00 |
| Vitamin E Acetate | 0.50 | | 0.25 | | 1.00 |
| Glucosylrutin | 0.60 | | | 0.25 | |
| Biosaccharide Gum-1 | | 2.50 | 0.50 | | 2.00 |
| DMDM Hydantoin | | 0.60 | 0.45 | 0.25 | |
| Iodopropynyl Butylcarbamate | 0.20 | | | | |
| Methylparaben | 0.50 | | 0.25 | 0.15 | |
| Phenoxyethanol | 0.50 | 0.40 | | 1.00 | |
| Trisodium EDTA | | 0.01 | 0.05 | | 0.10 |
| Ethanol | 3.00 | 2.00 | 1.50 | | 7.00 |
| Perfume oil | 0.20 | | 0.05 | 0.40 | |
| Aqua dem. | ad 100 | ad 100 | ad 100 | ad 100 | ad 100 |

[0605] WO Sunscreen Emulsion

| | 1 | 2 | 3 | 4 | 5 |
|---|---|---|---|---|---|
| Cetyl Dimethicone | | 2.50 | | 4.00 | |
| Polyglyceryl-2 Dipolyhydroxystearate | 5.00 | | | | 4.50 |
| PEG-30 Dipolyhydroxystearate | | | 5.00 | | |
| Keratin-binding domain-reactive dye 14_264 | 5.0 | 1.0 | 10.0 | 0.5 | 15.0 |
| UvaSorb ® k2A | | 2.00 | | | |
| Ethylhexyl Bis-Isopentylbenzoxazolylphenyl | | | | | |
| Melamine | | | | | |
| Ethylhexyl Methoxycinnamate Uvinul ® MC | | | | | 5.00 |
| 80 | | | | | |
| Bis-Ethylhexyloxyphenol Methoxyphenyl | | 1.50 | | 2.00 | 2.50 |
| Triazine | | | | | |
| Butyl Methoxydibenzoylmethane | | | 2.00 | | 2.00 |
| Disodium Phenyl Dibenzimidazole | 2.50 | | 0.50 | 2.00 | |
| Tetrasulfonate | | | | | |
| Ethyhexyl Triazone Uvinul ® T 150 | 4.00 | | 3.00 | 4.00 | |
| Octocrylene | | 4.00 | | | |
| Diethylhexyl Butamido Triazone | 1.00 | | | 2.00 | 1.00 |
| Phenylbenzimidazole Sulfonic Acid | 0.50 | | 3.00 | | |
| Methylene Bis-Benzotriazolyl | 2.00 | | 0.50 | 1.50 | 2.50 |
| Tetramethylbutylphenol | | | | | |
| Ethylhexyl Salicylate | | | 3.00 | | |
| Drometrizole Trisiloxane | | | 0.50 | | |
| Terephthalidene Dicamphor Sulfonic Acid | | 1.50 | | 1.00 | 1.00 |
| Diethylhexyl 2,6-Naphthalate | | | 7.00 | | 4.00 |
| Titanium Dioxide-microfine | 1.00 | | 3.00 | | 3.50 |
| Zinc Oxide-microfine | | | | 0.25 | |
| Mineral Oil | | 12.00 | 10.00 | | 8.00 |
| C12-15 Alkyl Benzoate | | | | 9.00 | |
| Dicaprylyl Ether | 10.00 | | | | 7.00 |
| Butylene Glycol Dicaprylate/Dicaprate | | | 2.00 | 8.00 | 4.00 |
| Dicaprylyl Carbonate | 5.00 | | 6.00 | | |
| Dimethicone | | 4.00 | 1.00 | 5.00 | |
| Cyclomethicone | 2.00 | 25.00 | | | 2.00 |
| Butyrospermum Parkii (Shea Butter) | | | 3.00 | | |
| Petrolatum | | 4.50 | | | |
| VP/Hexadecene Copolymer | 0.50 | | | 0.50 | 1.00 |
| Ethylhexylglycerin | | 0.30 | 1.00 | | 0.50 |
| Glycerin | 3.00 | 7.50 | | 7.50 | 8.50 |
| Glycine Soja (Soybean) Oil | | 1.00 | 1.50 | | 1.00 |
| Magnesium Sulfate MgSO₄ | 1.00 | 0.50 | | 0.50 | |
| Magnesium Chloride MgCl₂ | | | 1.00 | | 0.70 |
| Vitamin E Acetate | 0.50 | | 0.25 | | 1.00 |
| Ascorbyl Palmitate | 0.50 | | | 2.00 | |
| Biosaccharide Gum-1 | | | | 3.50 | 1.00 |
| DMDM Hydantoin | | 0.60 | 0.40 | 0.20 | |
| Methylparaben | 0.50 | | 0.25 | 0.15 | |
| Phenoxyethanol | 0.50 | 0.40 | | 1.00 | |
| Trisodium EDTA | 0.12 | 0.05 | | 0.30 | |
| Ethanol | 3.00 | | 1.50 | | 5.00 |
| Perfume oil | 0.20 | | 0.40 | 0.35 | |
| Aqua dem. | ad 100 | ad 100 | ad 100 | ad 100 | ad 100 |

[0606] Sticks

| | 1 | 2 | 3 | 4 |
|---|---|---|---|---|
| Caprylic/Capric Triglyceride | 12.00 | 10.00 | 6.00 | |
| Octyldodecanol | 7.00 | 14.00 | 8.00 | 3.00 |
| Butylene Glycol Dicaprylate/Dicaprate | | | | 12.00 |
| Pentaerythrityl Tetraisostearate | 10.00 | 6.00 | 8.00 | 7.00 |
| Polyglyceryl-3 Diisostearate | 2.50 | | | |
| Bis-Diglyceryl Polyacyladipate-2 | 9.00 | 8.00 | 10.00 | 8.00 |
| Cetearyl Alcohol | 8.00 | 11.00 | 9.00 | 7.00 |
| Myristyl Myristate | 3.50 | 3.00 | 4.00 | 3.00 |
| Beeswax | 5.00 | 5.00 | 6.00 | 6.00 |
| Copernicia Cerifera (Carnauba) Wax | 1.50 | 2.00 | 2.00 | 1.50 |
| Cera Alba | 0.50 | 0.50 | 0.50 | 0.40 |
| C16-40 Alkyl Stearate | | 1.50 | 1.50 | 1.50 |
| Keratin-binding domain-reactive dye 14_264 | 0.5 | 3.0 | 1.0 | 5.0 |
| UvaSorb ® k2A | | 2.00 | | 4.00 |
| Ethylhexyl Bis-Isopentylbenzoxazolylphenyl | | | | |
| Melamine | | | | |
| Ethylhexyl Methoxycinnamate Uvinul ® MC | | 3.00 | | |
| 80 | | | | |
| Bis-Ethylhexyloxyphenol Methoxyphenyl | | 1.50 | | 2.00 |
| Triazine | | | | |
| Butyl Methoxydibenzoylmethane | | | 2.00 | |
| Disodium Phenyl Dibenzimidazole | 2.50 | | 0.50 | 2.00 |
| Tetrasulfonate | | | | |
| Ethylhexyl Triazone Uvinul ® T 150 | 4.00 | | 3.00 | 4.00 |
| Octocrylene | | 4.00 | | |
| Diethylhexyl Butamido Triazone | 1.00 | | | 2.00 |
| Phenylbenzimidazole Sulfonic Acid | 0.50 | | 3.00 | |
| Methylene Bis-Benzotriazolyl | 2.00 | | 0.50 | 1.50 |
| Tetramethylbutylphenol | | | | |
| Ethylhexyl Salicylate | | | 3.00 | |
| Drometrizole Trisiloxane | | | 0.50 | |
| Terephthalidene Dicamphor Sulfonic Acid | | 1.50 | | 1.00 |
| Diethylhexyl 2,6-Naphthalate | | | 7.00 | |
| Titanium Dioxide-microfine | 1.00 | | 3.00 | |
| Zinc Oxide-microfine | | | | 0.25 |
| Vitamin E Acetate | 0.50 | 1.00 | | |
| Ascorbyl Palmitate | 0.05 | | 0.05 | |
| Buxux Chinensis (Jojoba) Oil | 2.00 | 1.00 | | 1.00 |
| Perfume oil, BHT | 0.10 | 0.25 | | 0.35 |
| Ricinus Communis (Castor) Oil | ad 100 | ad 100 | ad 100 | ad 100 |

[0607] PIT Emulsion

| | 1 | 2 | 3 | 4 | 5 | 6 | 7 | 8 |
|---|---|---|---|---|---|---|---|---|
| Glyceryl Monostearate SE | 0.50 | 2.00 | 3.00 | 5.00 | | 0.50 | 4.00 | |
| Glyceryl Isostearate | | | | | 3.50 | 4.00 | 2.00 | |
| Isoceteth-20 | | 0.50 | | | 2.00 | | | |
| Ceteareth-12 | | 5.00 | | 1.00 | | | 3.50 | 5.00 |
| Ceteareth-20 | | 5.00 | | 1.00 | | | | 3.50 |
| PEG-100 Stearate | | | | 2.80 | | 2.30 | 3.30 | |
| Cetyl Alcohol | 5.20 | | 1.20 | 1.00 | 1.30 | | 0.50 | 0.30 |
| Cetyl Palmitate | 2.50 | 1.20 | | 1.50 | | 0.50 | | 1.50 |
| Cetyl Dimethicone | | | | 0.50 | | 1.00 | | |
| Copolyol | | | | | | | | |
| Polyglyceryl-2 Dioleate | | | | 0.75 | 0.30 | | | |
| Keratin-binding domain- | 0.1 | 5.0 | 0.01 | 0.5 | 20.0 | 0.25 | 10.0 | 3.0 |
| reactive dye 14_264 | | | | | | | | |
| UvaSorb ® k2A | | | 4.00 | | | | 1.50 | |
| Ethylhexyl Bis- | | | | | | | | |
| Isopentylbenzoxazolyl- | | | | | | | | |
| phenyl Melamine | | | | | | | | |
| Ethylhexyl | | | | | 5.00 | 6.00 | 8.00 | 5.00 |
| Methoxycinnamate | | | | | | | | |
| Uvinul ® MC 80 | | | | | | | | |
| Bis-Ethylhexyloxyphenol | | 1.50 | | 2.00 | 2.50 | | 2.50 | 2.50 |
| Methoxyphenyl Triazine | | | | | | | | |
| Butyl Methoxydibenzoyl- | | | 2.00 | | 2.00 | 1.50 | | 2.00 |
| methane | | | | | | | | |
| Disodium Phenyl | 2.50 | | 0.50 | 2.00 | | 0.30 | | |
| Dibenzimidazole | | | | | | | | |
| Tetrasulfonate | | | | | | | | |
| Ethylhexyl Triazone | 4.00 | | 3.00 | 4.00 | | 2.00 | | |
| Uvinul ® T 150 | | | | | | | | |
| Octocrylene | | 4.00 | | | | | 7.50 | |
| Diethylhexyl Butamido | 1.00 | | | 2.00 | 1.00 | | 1.00 | 1.00 |
| Triazone | | | | | | | | |
| Phenylbenzimidazole | 0.50 | | 3.00 | | | | | |
| Sulfonic Acid | | | | | | | | |
| Methylene Bis- | 2.00 | | 0.50 | 1.50 | 2.50 | | | 2.50 |
| Benzotriazolyl | | | | | | | | |
| Tetramethylbutylphenol | | | | | | | | |
| Ethylhexyl Salicylate | | | 3.00 | | | | 5.00 | |
| Drometrizole Trisiloxane | | | 0.50 | | | 1.00 | | |
| Terephthalylidene | | 1.50 | | 1.00 | 1.00 | | 0.50 | 1.00 |
| Dicamphor Sulfonic Acid | | | | | | | | |
| Diethylhexyl 2,6- | | | 7.00 | | 10.00 | 7.50 | | 8.00 |
| Naphthalate | | | | | | | | |
| Titanium | 1.00 | | 3.00 | | 3.50 | | 1.50 | 3.50 |
| Dioxide-microfine | | | | | | | | |
| Zinc Oxide-microfine | | | | 0.25 | | 2.00 | | |
| C12-15 Alkyl Benzoate | 3.50 | | | 6.35 | | | | 0.10 |
| Cocoglyceride | | 3.00 | | 3.00 | | | | 1.00 |
| Dicaprylyl Ether | 4.50 | | | | | | | |
| Dicaprylyl Carbonate | | 4.30 | | 3.00 | | | | 7.00 |
| Dibutyl Adipate | | | | 0.50 | | | | 0.30 |
| Phenyl Trimethicone | 2.00 | | | 3.50 | | 2.00 | | |
| Cyclomethicone | | 3.00 | | | | | | |
| C1-5 Alkyl | | 0.50 | | | 2.00 | | | |
| Galactomannan | | | | | | | | |
| Hydrogenated Coco- | | | | | 3.00 | 4.00 | | |
| Glycerides | | | | | | | | |
| Behenoxy Dimethicone | | | | | | 1.50 | 2.00 | |
| VP/Hexadecene | | | | 1.00 | 1.20 | | | |
| Copolymer | | | | | | | | |
| Glycerin | 4.00 | 6.00 | 5.00 | | 8.00 | 10.00 | | |
| Vitamin E Acetate | 0.20 | 0.30 | 0.40 | | 0.30 | | | |
| Butyrospermum Parkii | | 2.00 | | 3.60 | | 2.00 | | |
| (Shea Butter) | | | | | | | | |
| Iodopropyl | 0.12 | | | | 0.20 | | | |
| Butylcarbamate | | | | | | | | |
| Biosaccharide Gum-1 | | | | 0.10 | | | | |
| DMDM Hydantoin | 0.10 | | | | 0.12 | | 0.13 | |
| Methylparaben | | 0.50 | 0.30 | | 0.35 | | | |
| Phenoxyethanol | 0.50 | 0.40 | | 1.00 | | | | |
| Ethylhexylglycerin | | 0.30 | | | 1.00 | | 0.35 | |
| Ethanol | 2.00 | | 2.00 | | | 5.00 | | |
| Trisodium EDTA | 0.40 | | 0.15 | | | 0.20 | | |
| Perfume oil | 0.20 | | 0.20 | | 0.24 | 0.16 | 0.10 | 0.10 |
| Aqua dem. | ad 100 | ad 100 | ad 100 | ad 100 | ad 100 | ad 100 | ad 100 | ad 100 |

[0608] Skin, or Hair-Tinting Gel Cream

| | 1 | 2 | 3 | 4 |
|---|---|---|---|---|
| Acrylates/C10-30 Alkylacrylate | 0.40 | 0.35 | 0.40 | 0.35 |
| Crosspolymer | | | | |
| Carbomer | 0.20 | 0.22 | 0.20 | 0.22 |
| Luvigel ® EM | 1.50 | 2.50 | 2.80 | 3.50 |
| Xanthan Gum | 0.10 | 0.13 | 0.10 | 0.13 |
| Cetearyl Alcohol | 3.00 | 2.50 | 3.00 | 2.50 |
| C12-15 Alkyl benzoate | 4.00 | 4.50 | 4.00 | 4.50 |
| Caprylic/Capric Triglyceride | 3.00 | 3.50 | 3.00 | 3.50 |
| Titanium Dioxide-microfine | 1.00 | | 1.50 | |
| Zinc Oxide-microfine | | 2.00 | | 0.25 |
| Keratin-binding domain-reactive | 0.5 | 10.0 | 3.0 | 5.0 |
| dye 14_264 | | | | |
| Dihydroxyacetone | | | 3.00 | 5.00 |
| Cyclomethicone | 5.00 | 5.50 | 5.00 | 5.50 |
| Dimethicone | 1.00 | 0.60 | 1.00 | 0.60 |
| Glycerin | 1.00 | 1.20 | 1.00 | 1.20 |
| Sodium Hydroxide | q.s. | q.s. | q.s. | q.s. |
| Preservative | 0.30 | 0.23 | 0.30 | 0.23 |
| Perfume oil | 0.20 | | 0.20 | |
| Aqua dem. | ad 100 | ad 100 | ad 100 | ad 100 |
| adjust pH to 6.0 | | | | |

[0609] OW Self-Tanning Formulation

| | 1 | 2 | 3 | 4 | 5 | 6 | 7 |
|---|---|---|---|---|---|---|---|
| Glyceryl Monostearate SE | 0.50 | 1.00 | 3.00 | | | 1.50 | |
| Glyceryl Stearate Citrate | 2.00 | | 1.00 | 2.00 | 4.00 | | |
| Stearic Acid | | 3.00 | | 2.00 | | | |
| PEG-40 Stearate | 0.50 | | | | | 2.00 | |
| Cetyl Phosphate | | | | | | 1.00 | |
| Cetearyl Sulfate | | | | | | | 0.75 |
| Stearyl Alcohol | | | 3.00 | | | 2.00 | 0.60 |
| Cetyl Alcohol | 2.50 | 1.10 | | 1.50 | 0.60 | | 2.00 |
| Keratin-binding domain- | 0.1 | 0.5 | 0.025 | 5.0 | 3.0 | 10.0 | 1.0 |
| reactive dye 14_264 | | | | | | | |
| Dihydroxyacetone | | | 3.00 | 5.00 | | 4 | |
| Titanium Dioxide-microfine | 1.00 | | | | 1.50 | | 1.50 |
| Zinc Oxide-microfine | | | | 0.25 | | 2.00 | |
| C12-15 Alkyl Benzoate | | 0.25 | | | 4.00 | 7.00 | |
| Dicaprylyl Ether | | | 3.50 | | 2.00 | | |
| Butylene Glycol | 5.00 | | 6.00 | | | | |
| Dicaprylate/Dicaprate | | | | | | | |
| Cocoglycerides | | | 6.00 | | 2.00 | | |
| Dimethicone | 0.50 | | 1.00 | | 2.00 | | |
| Cyclomethicone | 2.00 | | 0.50 | | 0.50 | | |
| Butyrospermum Parkii (Shea | | 2.00 | | | | | |
| Butter) | | | | | | | |
| VP/Hexadecene Copolymer | 0.20 | | | 0.50 | | 1.00 | |
| Glycerin | 3.00 | 7.50 | | 7.50 | 5.00 | | 2.50 |
| Xanthan Gum | 0.15 | | 0.05 | | | 0.30 | |
| Sodium Carbomer | | 0.20 | | 0.15 | 0.25 | | |
| Vitamin E Acetate | 0.60 | | 0.23 | | 0.70 | 1.00 | |
| Biosaccharide Gum-1 | | 3.00 | 10.00 | | | | |
| Glycine Soja (Soybean) Oil | | | | 0.50 | | 1.50 | 1.00 |
| Ethylhexylglycerin | 0.30 | | | | | | |
| DMDM Hydantoin | | 0.60 | 0.40 | 0.20 | | | |
| Iodopropynyl Butylcarbamate | | | | 0.18 | 0.20 | | |
| Methylparaben | 0.15 | | 0.25 | | 0.50 | | |
| Phenoxyethanol | 1.00 | 0.40 | | | 0.40 | 0.50 | 0.40 |
| Trisodium EDTA | 0.02 | | 0.05 | | | | |
| Tetrasodium | | | | 0.25 | 1.00 | | |
| Iminodisuccinate | | | | | | | |
| Ethanol | 2.00 | 1.50 | | 3.00 | | 1.20 | 5.00 |
| Perfume oil | 0.10 | 0.25 | 0.30 | | 0.40 | 0.20 | |
| Aqua dem. | ad 100 | ad 100 | ad 100 | ad 100 | ad 100 | ad 100 | ad 100 |

[0610] OW Make Up

| | 1 | 2 | 3 | 4 | 5 | 6 | 7 |
|---|---|---|---|---|---|---|---|
| Glyceryl Monostearate SE | 0.50 | 1.00 | 3.00 | | | 1.50 | |
| Glyceryl Stearate Citrate | 2.00 | | 1.00 | 2.00 | 4.00 | | |
| Stearic Acid | | 3.00 | | 2.00 | | | |
| PEG-40 Stearate | 0.50 | | | | | 2.00 | |
| Cetyl Phosphate | | | | | | 1.00 | |
| Cetearyl Sulfate | | | | | | | 0.75 |
| Stearyl Alcohol | | | 3.00 | | | 2.00 | 0.60 |
| Cetyl Alcohol | 2.50 | 1.10 | | 1.50 | 0.60 | | 2.00 |
| Keratin-binding domain- | 3.0 | 5.0 | 2.0 | 0.5 | 1.0 | 5.0 | 10.0 |
| reactive dye 14_264 | | | | | | | |
| Titanium Dioxide | 10.00 | 12.00 | 9.00 | 8.50 | 11.00 | 9.50 | 10.00 |
| Iron Oxide | 2.00 | — | 3.00 | 5.00 | 0.2 | 6.00 | 4.40 |
| Zinc Oxide | | — | | 2.00 | | 3.00 | |
| C12-15 Alkyl Benzoate | | 0.25 | | | 4.00 | 7.00 | |
| Dicaprylyl Ether | | | 3.50 | | 2.00 | | |
| Butylene Glycol | 5.00 | | 6.00 | | | | |
| Dicaprylate/Dicaprate | | | | | | | |
| Cocoglycerides | | | 6.00 | | 2.00 | | |
| Dimethicone | 0.50 | | 1.00 | | 2.00 | | |
| Cyclomethicone | 2.00 | | 0.50 | | 0.50 | | |
| Butyrospermum Parkii (Shea | | 2.00 | | | | | |
| Butter) | | | | | | | |
| VP/Hexadecene Copolymer | 0.20 | | | 0.50 | | 1.00 | |
| Glycerin | 3.00 | 7.50 | | 7.50 | 5.00 | | 2.50 |
| Xanthan Gum | 0.15 | | 0.05 | | | 0.30 | |
| Sodium Carbomer | | 0.20 | | 0.15 | 0.25 | | |
| Vitamin E Acetate | 0.60 | | 0.23 | | 0.70 | 1.00 | |
| Glycine Soja (Soybean) Oil | | | | 0.50 | | 1.50 | 1.00 |
| Ethylhexylglycerin | 0.30 | | | | | | |
| DMDM Hydantoin | | 0.60 | 0.40 | 0.20 | | | |
| Iodopropynyl Butylcarbamate | | | | 0.18 | 0.20 | | |
| Methylparaben | 0.15 | | 0.25 | | 0.50 | | |
| Phenoxyethanol | 1.00 | 0.40 | | | 0.40 | 0.50 | 0.40 |
| Trisodium EDTA | 0.02 | | 0.05 | | | | |
| Tetrasodium | | | | 0.25 | 1.00 | | |
| Iminodisuccinate | | | | | | | |
| Ethanol | 2.00 | 1.50 | | 3.00 | | 1.20 | 5.00 |
| Perfume oil | 0.10 | 0.25 | 0.30 | | 0.40 | 0.20 | |
| Aqua dem. | ad 100 | ad 100 | ad 100 | ad 100 | ad 100 | ad 100 | ad 100 |

[0611] Self-Tanning Hydrodispersion with Tinting Effect

| | 1 | 2 | 3 | 4 | 5 |
|---|---|---|---|---|---|
| Ceteaereth-20 | 1.00 | | | 0.50 | |
| Cetyl Alcohol | | | 1.00 | | |
| Luvigel ® EM | | 2.00 | | 2.50 | 2.00 |
| Acrylates/C10-30 Alkyl Acrylate | 0.50 | | 0.40 | 0.10 | 0.50 |
| Crosspolymer | | | | | |
| Xanthan Gum | | 0.30 | 0.15 | | |
| Keratin-binding domain-reactive dye | 3.0 | 1.0 | 0.5 | 0.1 | 5.0 |
| 14_264 | | | | | |
| Dihydroxyacetone | | | 3.00 | 5.00 | |
| Titanium Dioxide - microfine | 1.00 | | 1.00 | | 1.00 |
| Zinc Oxide - microfine | | 1.90 | | 0.25 | |
| C12-15 Alkyl Benzoate | 2.00 | 2.50 | | | |
| Dicaprylyl Ether | | 4.00 | | | |
| Butylene Glycol Dicaprylate/Dicaprate | 4.00 | | 2.00 | 6.00 | |
| Dicaprylyl Carbonate | | 2.00 | 6.00 | | |
| Dimethicone | | 0.50 | 1.00 | | |
| Phenyl Trimethicone | 2.00 | | 0.50 | | |
| Butyrospermum Parkii (Shea Butter) | | 2.00 | | 5.00 | |
| VP/Hexadecene Copolymer | 0.50 | | | 0.50 | 1.00 |
| Tricontanyl PVP | 0.50 | | 1.00 | | |
| Ethylhexylglycerin | | | 1.00 | | 0.80 |
| Glycerin | 3.00 | 7.50 | | 7.50 | 8.50 |
| Glycine Soja (Soybean) Oil | | | 1.50 | | 1.00 |
| Vitamin E Acetate | 0.50 | | 0.25 | | 1.00 |
| Glucosylrutin | 0.60 | | | 0.25 | |
| DMDM Hydantoin | | 0.60 | 0.45 | 0.25 | |
| Iodopropynyl Butylcarbamate | 0.20 | | | | |
| Methylparaben | 0.50 | | 0.25 | 0.15 | |
| Phenoxyethanol | 0.50 | 0.40 | | 1.00 | |
| Trisodium EDTA | | 0.01 | 0.05 | | 0.10 |
| Ethanol | 3.00 | 2.00 | 1.50 | | 7.00 |
| Perfume oil | 0.20 | | 0.05 | 0.40 | |
| Aqua dem. | ad 100 | ad 100 | ad 100 | ad 100 | ad 100 |

[0612] After-Sun Hydrodispersion

| | 1 | 2 | 3 | 4 | 5 |
|---|---|---|---|---|---|
| Ceteaereth-20 | 1.00 | | | 0.50 | |
| Cetyl Alcohol | | | 1.00 | | |
| Luvigel ® EM | | 2.00 | | 2.50 | 2.00 |
| Acrylates/C10-30 Alkyl Acrylate | 0.50 | 0.30 | 0.40 | 0.10 | 0.50 |
| Crosspolymer | | | | | |
| Xanthan Gum | | 0.30 | 0.15 | | |
| Keratin-binding domain-reactive dye | 0.1 | 5.0 | 0.5 | 3.0 | 10.0 |
| 14_264 | | | | | |
| C12-15 Alkyl Benzoate | 2.00 | 2.50 | | | |
| Dicaprylyl Ether | | 4.00 | | | |
| Butylene Glycol Dicaprylate/Dicaprate | 4.00 | | 2.00 | 6.00 | |
| Dicaprylyl Carbonate | | 2.00 | 6.00 | | |
| Dimethicone | | 0.50 | 1.00 | | |
| Phenyl Trimethicone | 2.00 | | 0.50 | | |
| Tricontanyl PVP | 0.50 | | 1.00 | | |
| Ethylhexylglycerin | | | 1.00 | | 0.80 |
| Glycerin | 3.00 | 7.50 | | 7.50 | 8.50 |
| Glycine Soja (Soybean) Oil | | | 1.50 | | 1.00 |
| Vitamin E Acetate | 0.50 | | 0.25 | | 1.00 |
| Glucosylrutin | 0.60 | | | 0.25 | |
| Trisodium EDTA | | 0.01 | 0.05 | | 0.10 |
| Ethanol | 15.00 | 10.00 | 8.00 | 12.00 | 9.00 |
| Perfume oil | 0.20 | | 0.05 | 0.40 | |
| Aqua dem. | ad 100 | ad 100 | ad 100 | ad 100 | ad 100 |

[0613] WO Emulsion

| | 1 | 2 | 3 | 4 | 5 |
|---|---|---|---|---|---|
| Cetyl Dimethicone | | 2.50 | | 4.00 | |
| Polyglyceryl-2 Dipolyhydroxystearate | 5.00 | | | | 4.50 |
| PEG-30 Dipolyhydroxystearate | | | 5.00 | | |
| Keratin-binding domain-reactive dye 14_264 | 7.0 | 12.0 | 0.1 | 0.5 | 1.0 |
| Titanium Dioxide-microfine | 1.00 | | 3.00 | | 3.50 |
| Zinc Oxide-microfine | | 0.90 | | 0.25 | |
| Mineral Oil | | 12.00 | 10.00 | | 8.00 |
| C12-15 Alkyl Benzoate | | | | 9.00 | |
| Dicaprylyl Ether | 10.00 | | | | 7.00 |
| Butylene Glycol Dicaprylate/Dicaprate | | | 2.00 | 8.00 | 4.00 |
| Dicaprylyl Carbonate | 5.00 | | 6.00 | | |
| Dimethicone | | 4.00 | 1.00 | 5.00 | |
| Cyclomethicone | 2.00 | 25.00 | | | 2.00 |
| Butyrospermum Parkii (Shea Butter) | | | 3.00 | | |
| Petrolatum | | 4.50 | | | |
| VP/Hexadecene Copolymer | 0.50 | | | 0.50 | 1.00 |
| Ethylhexylglycerin | | 0.30 | 1.00 | | 0.50 |
| Glycerin | 3.00 | 7.50 | | 7.50 | 8.50 |
| Glycine Soja (Soybean) Oil | | 1.00 | 1.50 | | 1.00 |
| Magnesium Sulfate | 1.00 | 0.50 | | 0.50 | |
| Magnesium Chloride | | | 1.00 | | 0.70 |
| Vitamin E Acetate | 0.50 | | 0.25 | | 1.00 |
| Ascorbyl Palmitate | 0.50 | | | 2.00 | |
| Biosaccharide Gum-1 | | | | 3.50 | 7.00 |
| DMDM Hydantoin | | 0.60 | 0.40 | 0.20 | |
| Methylparaben | 0.50 | | 0.25 | 0.15 | |
| Phenoxyethanol | 0.50 | 0.40 | | 1.00 | |
| Trisodium EDTA | 0.12 | 0.05 | | 0.30 | |
| Ethanol | 3.00 | | 1.50 | | 5.00 |
| Perfume oil | 0.20 | | 0.40 | 0.35 | |
| Aqua dem. | ad 100 | ad 100 | ad 100 | ad 100 | ad 100 |

[0614] Solids-Stabilized Emulsion (Pickering Emulsions)

| | 1 | 2 | 3 | 4 | 5 |
|---|---|---|---|---|---|
| Mineral Oil | | | 16.00 | 16.00 | |
| Octyldodecanol | 9.00 | 9.00 | 5.00 | | |
| Caprylic/Capric Triglyceride | 9.00 | 9.00 | 6.00 | | |
| C12-15 Alkyl Benzoate | | | | 5.00 | 8.00 |
| Butylene Glycol Dicaprylate/Dicaprate | | | | | 8.00 |
| Dicaprylyl Ether | 9.00 | | | 4.00 | |
| Dicaprylyl Carbonate | | 9.00 | | | |
| Hydroxyoctacosanyl Hydroxystearate | 2.00 | 2.00 | 2.20 | 2.50 | 1.50 |
| Disteardimonium Hectorite | 1.00 | 0.75 | | 0.50 | 0.25 |
| Cera Microcristalline + Paraffinum Liquidum | | 0.35 | | | 5.00 |
| Hydroxypropyl Methylcellulose | | | 0.10 | | 0.05 |
| Dimethicone | | | | | 3.00 |
| Keratin-binding domain-reactive dye 14_264 | 1.0 | 15.0 | 0.1 | 3.0 | 5.0 |
| Titanium Dioxide + Alumina + Simethicone + | | 3.00 | | | |
| Aqua | | | | | |
| Titanium Dioxide + Trimethoxycaprylylsilane | | 2.00 | 4.00 | 2.00 | 4.00 |
| Silica Dimethyl Silylate | 2.50 | | | 6.00 | 2.50 |
| Boron Nitride | | | 1.00 | | |
| Starch/Sodium Metaphosphate Polymer | 2.00 | | | | |
| Tapioca Starch | | 0.50 | | | |
| Sodium Chloride | 5.00 | 7.00 | 8.50 | 3.00 | 4.50 |
| Glycerin | | | | 1.00 | |
| Trisodium EDTA | 1.00 | 1.00 | 1.00 | 1.00 | 1.00 |
| Vitamin E Acetate | 5.00 | 10.00 | 3.00 | 6.00 | 10.00 |
| Ascorbyl Palmitate | 1.00 | 1.00 | | 1.00 | |
| Methylparaben | | 0.60 | | | 0.20 |
| Propylparaben | | | | | 0.20 |
| Phenoxyethanol | | | 0.20 | | |
| Hexamidine Diisethionate | | | 0.40 | 0.50 | 0.40 |
| Diazolidinyl Urea | | | | | 0.08 |
| Ethanol | | | 0.23 | 0.20 | |
| Perfume oil | 5.00 | | 3.00 | 4.00 | |
| Aqua dem. | 0.20 | | 0.30 | 0.10 | |
| | ad 100 | ad 100 | ad 100 | ad 100 | ad 100 |

[0615] Sticks

| | 1 | 2 | 3 | 4 |
|---|---|---|---|---|
| Caprylic/Capric Triglyceride | 12.00 | 10.00 | 6.00 | |
| Octyldodecanol | 7.00 | 14.00 | 8.00 | 3.00 |
| Butylene Glycol Dicaprylate/ | | | | 12.00 |
| Dicaprate | | | | |
| Pentaerythrityl Tetraisostearate | 10.00 | 6.00 | 8.00 | 7.00 |
| Polyglyceryl-3 Diisostearate | 2.50 | | | |
| Bis-Diglyceryl Polyacyladipate-2 | 9.00 | 8.00 | 10.00 | 8.00 |
| Cetearyl Alcohol | 8.00 | 11.00 | 9.00 | 7.00 |
| Myristyl Myristate | 3.50 | 3.00 | 4.00 | 3.00 |
| Beeswax | 5.00 | 5.00 | 6.00 | 6.00 |
| Copernicia Cerifera (Carnauba) | 1.50 | 2.00 | 2.00 | 1.50 |
| Wax | | | | |
| Cera Alba | 0.50 | 0.50 | 0.50 | 0.40 |
| C16-40 Alkyl Stearate | | 1.50 | 1.50 | 1.50 |
| Keratin-binding domain-reactive | 10.0 | 1.0 | 3.0 | 0.1 |
| dye 14_264 | | | | |
| Uvinul ® A Plus ™ | 2.00 | 1.50 | 0.75 | 9.00 |
| Titanium Dioxide-microfine | 1.00 | | 3.00 | |
| Zinc Oxide-microfine | | 1.00 | | 0.25 |
| Vitamin E Acetate | 0.50 | 1.00 | | |
| Ascorbyl Palmitate | 0.05 | | 0.05 | |
| Buxux Chinensis (Jojoba) Oil | 2.00 | 1.00 | | 1.00 |
| Perfume oil, BHT | 0.10 | 0.25 | | 0.35 |
| Ricinus Communis (Castor) Oil | ad 100 | ad 100 | ad 100 | ad 100 |

[0616] Self-Tanning PIT Emulsions

| | 1 | 2 | 3 | 4 | 5 | 6 | 7 | 8 |
|---|---|---|---|---|---|---|---|---|
| Glyceryl Monostearate SE | 0.50 | 2.00 | 3.00 | 5.00 | | 0.50 | 4.00 | |
| Glyceryl Isostearate | | | | | 3.50 | 4.00 | 2.00 | |
| Isoceteth-20 | | 0.50 | | | 2.00 | | | |
| Ceteareth-12 | | 5.00 | | 1.00 | | | 3.50 | 5.00 |
| Ceteareth-20 | | 5.00 | | 1.00 | | | | 3.50 |
| PEG-100 Stearate | | | | 2.80 | | 2.30 | 3.30 | |
| Cetyl Alcohol | 5.20 | | 1.20 | 1.00 | 1.30 | | 0.50 | 0.30 |
| Cetyl Palmitate | 2.50 | 1.20 | | 1.50 | | 0.50 | | 1.50 |
| Cetyl Dimethicone Copolyol | | | | 0.50 | | 1.00 | | |
| Polyglyceryl-2 | | | | 0.75 | 0.30 | | | |
| Keratin-binding domain-reactive | 0.1 | 0.5 | 0.01 | 5.0 | 0.5 | 3.0 | 0.025 | 10.0 |
| dye 14_264 | | | | | | | | |
| Dihydroxyacetone | | | 3.00 | 5.00 | | | 4.00 | |
| Titanium Dioxide - microfine | 1.00 | | 1.50 | | 3.50 | | 1.50 | 1.00 |
| Zinc Oxide - microfine | | 1.00 | | 0.25 | | 2.00 | | 1.50 |
| C12-15 Alkyl Benzoate | 3.50 | | | 6.35 | | | | 0.10 |
| Cocoglycerides | | 3.00 | | 3.00 | | | | 1.00 |
| Dicaprylyl Ether | 4.50 | | | | | | | |
| Dicaprylyl Carbonate | | 4.30 | | 3.00 | | | | 7.00 |
| Dibutyl Adipate | | | | 0.50 | | | | 0.30 |
| Phenyl Trimethicone | 2.00 | | | 3.50 | | 2.00 | | |
| Cyclomethicone | | 3.00 | | | | | | |
| C1-5 Alkyl Galactomannan | | 0.50 | | | 2.00 | | | |
| Hydrogenated Cocoglycerides | | | | | 3.00 | 4.00 | | |
| Behenoxy Dimethicone | | | | | | 1.50 | 2.00 | |
| VP/Hexadecene Copolymer | | | | 1.00 | 1.20 | | | |
| Glycerin | 4.00 | 6.00 | 5.00 | | 8.00 | 10.00 | | |
| Vitamin E Acetate | 0.20 | 0.30 | 0.40 | | 0.30 | | | |
| Butyrospermum Parkii (Shea | | 2.00 | | 3.60 | | 2.00 | | |
| Butter) | | | | | | | | |
| Iodopropyl Butylcarbamate | 0.12 | | | | 0.20 | | | |
| DMDM Hydantoin | 0.10 | | | | 0.12 | | 0.13 | |
| Methylparaben | | 0.50 | 0.30 | | 0.35 | | | |
| Phenoxyethanol | 0.50 | 0.40 | | 1.00 | | | | |
| Ethylhexylglycerin | | 0.30 | | | 1.00 | | 0.35 | |
| Ethanol | 2.00 | | 2.00 | | | 5.00 | | |
| Trisodium EDTA | 0.40 | | 0.15 | | | 0.20 | | |
| Perfume oil | 0.20 | | 0.20 | | 0.24 | 0.16 | 0.10 | 0.10 |
| Aqua dem. | ad 100 | ad 100 | ad 100 | ad 100 | ad 100 | ad 100 | ad 100 | ad 100 |

[0617] Oil Gel

| | 1 | 2 | 3 | 4 |
|---|---|---|---|---|
| Caprylic/Capric Triglyceride | 12.00 | 10.00 | 6.00 | |
| Octyldodecanol | 7.00 | 14.00 | 8.00 | 3.00 |
| Butylene Glycol | | | | 12.00 |
| Dicaprylate/Dicaprate | | | | |
| Pentaerythrityl Tetraisostearate | 10.00 | 6.00 | 8.00 | 7.00 |
| Polyglyceryl-3 Diisostearate | 2.50 | | | |
| Bis-Diglyceryl Polyacyladipate-2 | 9.00 | 8.00 | 10.00 | 8.00 |
| Myristyl Myristate | 3.50 | 3.00 | 4.00 | 3.00 |
| Quaternium-18 Bentonite | 5.00 | 5.00 | 6.00 | 6.00 |
| Propylene Carbonate | 15.00 | 20.00 | 18.00 | 19.50 |
| Keratin-binding domain-reactive | 1.0 | 0.5 | 3.0 | 5.0 |
| dye 14_264 | | | | |
| Vitamin E Acetate | 0.50 | 1.00 | | |
| Ascorbyl Palmitate | 0.05 | | 0.05 | |
| Buxus Chinensis (Jojoba) Oil | 2.00 | 1.00 | | 1.00 |
| Perfume oil, BHT | 0.10 | 0.25 | | 0.35 |
| Ricinus Communis (Castor) Oil | ad 100 | ad 100 | ad 100 | ad 100 |

### Example 63

[0618] In the following formulations cosmetic sunscreen preparations comprising a combination of at least one inorganic pigment, preferably zinc oxide and/or titanium oxide, Uvinul A Plus and further organic UV-A and UV-B filters are described.

[0619] The inorganic pigments here may be present in coated form, i.e. that they are treated superficially. This surface treatment can, for example, consist in providing the pigments with a thin hydrophobic layer by a method known per se, as described in DE-A-33 14 742.

[0620] The formulations given below are prepared in a customary way known to the person skilled in the art.

[0621] Dermocosmetic preparations according to the invention are described below comprising the keratin-binding effector molecule prepared according to Example 19 (keratin-binding domain according to SEQ ID No.: ID 166 coupled with the dye 14_{—}264). Said keratin-binding effector molecule is referred to in the examples below as keratin-binding domain-reactive dye 14_{—}264. It goes without saying for the person skilled in the art that all of the other dyes described in Tables 6 and 7 can also be coupled with the KBD according to Example 19, 19 a or 19 b and can be used in the preparations given below.

[0622] The content of keratin-binding domain-reactive dye 14_{—}264 refers to 100% of active ingredient. The active ingredient according to the invention can be used either in pure form or as an aqueous solution. In the case of the aqueous solution, the content of water dem. in the particular formulation must be adjusted.

| | | | |
|---|---|---|---|
| A | 7.50 | Uvinul ® MC 80 | Ethylhexyl Methoxycinnamate |
| | 2.00 | Uvinul ® M 40 | Benzophenone-3 |
| | 0.80 | Rylo PG 11 | Polyglyceryl Dimer Soyate |
| | 1.00 | Span ™ 60 | Sorbitan Stearate |
| | 0.50 | Vitamin E Acetate | Tocopheryl Acetate |
| | 3.00 | Dracorin ® 100 SE | Glyceryl Stearate, PEG-100 Stearate |
| | 1.00 | Cremophor ® CO 410 | PEG-40 Hydrogenated Castor Oil |
| B | 3.00 | T-Lite ® SF | Titanium Dioxide, Alumina Hydrate, |
| | | | Dimethicone/Methicone Copolymer |
| | 1.00 | Cetiol ® SB 45 | Butyrospermum Parkii (Shea Butter) |
| | 6.50 | Finsolv ® TN | C12-15 Alkyl Benzoate |
| C | 5.00 | Butylene Glycol | Butylene Glycol |
| | 0.30 | Keltrol ® | Xanthan Gum |
| | 0.10 | Edeta BD | Disodium EDTA |
| | 0.10 | Allantoin | Allantoin |
| | 66.20 | Water demin. | Aqua dem. |
| D | 1.00 | Sepigel 305 | Polyacrylamide. C13-14 Isoparaffin, Laureth-7 |
| | 1.00 | Keratin-binding domain- | |
| | | reactive dye 14_264 | |
| | q.s. | Preservative | |
| A | 7.50 | Uvinul ® MC 80 | Ethylhexyl Methoxycinnamate |
| | 2.00 | Uvinul ® M 40 | Benzophenone-3 |
| | 0.80 | Rylo PG 11 | Polyglyceryl Dimer Soyate |
| | 1.00 | Span ™ 60 | Sorbitan Stearate |
| | 0.50 | Vitamin E Acetate | Tocopheryl Acetate |
| | 3.00 | Dracorin 100 SE | Glyceryl Stearate, PEG-100 Stearate |
| | 1.00 | Cremophor ® CO 410 | PEG-40 Hydrogenated Castor Oil |
| B | 3.00 | Z-COTE ® MAX | Zinc Oxide, Diphenyl Capryl Methicone |
| | 1.00 | Cetiol ® SB 45 | Butyrospermum Parkii (Shea Butter) |
| | 6.50 | Finsolv TN | C12-15 Alkyl Benzoate |
| C | 5.00 | Butylene Glycol | Butylene Glycol |
| | 0.30 | Keltrol | Xanthan Gum |
| | 0.10 | Edeta BD | Disodium EDTA |
| | 0.10 | Allantoin | Allantoin |
| | 66.20 | Water demin. | Aqua dem. |
| D | 2.00 | Simulgel NS | Hydroxyethyl Acrylate/Sodium |
| | | | Acryloyldimethyl Taurate Copolymer, |
| | | | Squalane, Polysorbate 60 |
| | 1.00 | Keratin-binding domain- | |
| | | reactive dye 14_264 | |
| | q.s. | Preservative | |
| A | 7.50 | Uvinul ® MC 80 | Ethylhexyl Methoxycinnamate |
| | 2.00 | Uvinul ® A Plus | Diethylamino Hydroxybenzoyl Hexyl Benzoate |
| | 0.80 | Rylo PG 11 | Polyglyceryl Dimer Soyate |
| | 1.00 | Span ™ 60 | Sorbitan Stearate |
| | 0.50 | Vitamin E Acetate | Tocopheryl Acetate |
| | 3.00 | Dracorin ® 100 SE | Glyceryl Stearate, PEG-100 Stearate |
| | 1.00 | Cremophor ® CO 410 | PEG-40 Hydrogenated Castor Oil |
| B | 3.00 | Z-COTE ® MAX | Zinc Oxide, Diphenyl Capryl Methicone |
| | 1.00 | Cetiol ® SB 45 | Butyrospermum Parkii (Shea Butter) |
| | 6.50 | Finsolv ® TN | C12-15 Alkyl Benzoate |
| C | 5.00 | Butylene Glycol | Butylene Glycol |
| | 0.30 | Keltrol ® | Xanthan Gum |
| | 0.10 | Edeta BD | Disodium EDTA |
| | 0.10 | Allantoin | Allantoin |
| | 66.20 | Water demin. | Aqua dem. |
| D | 2.00 | Simulgel ® NS | Hydroxyethyl Acrylate/Sodium |
| | | | Acryloyldimethyl Taurate Copolymer, |
| | | | Squalane, Polysorbate 60 |
| | 1.00 | Keratin-binding domain- | |
| | | reactive dye 14_264 | |
| | q.s. | Preservative | |
| A | 4.00 | Uvinul ® MC 80 | Ethylhexyl Methoxycinnamate |
| | 2.00 | Uvinul ® T 150 | Ethylhexyl Triazone |
| | 2.00 | Uvinul ® A Plus | Diethylamino Hydroxybenzoyl Hexyl Benzoate |
| | 0.80 | Rylo PG 11 | Polyglyceryl Dimer Soyate |
| | 1.00 | Span ™ 60 | Sorbitan Stearate |
| | 0.50 | Vitamin E Acetate | Tocopheryl Acetate |
| | 3.00 | Dracorin ® 100 SE | Glyceryl Stearate, PEG-100 Stearate |
| | 1.00 | Cremophor ® CO 410 | PEG-40 Hydrogenated Castor Oil |
| B | 3.00 | Z-COTE ® MAX | Zinc Oxide, Diphenyl Capryl Methicone |
| | 1.00 | Cetiol ® SB 45 | Butyrospermum Parkii (Shea Butter) |
| | 6.50 | Finsolv ® TN | C12-15 Alkyl Benzoate |
| C | 5.00 | Butylene Glycol | Butylene Glycol |
| | 0.30 | Keltrol ® | Xanthan Gum |
| | 0.10 | Edeta BD | Disodium EDTA |
| | 0.10 | Allantoin | Allantoin |
| | 66.20 | Water demin. | Aqua dem. |
| D | 2.00 | Simulgel ® NS | Hydroxyethyl Acrylate/Sodium |
| | | | Acryloyldimethyl Taurate Copolymer, |
| | | | Squalane, Polysorbate 60 |
| | 1.00 | Keratin-binding domain- | |
| | | reactive dye 14_264 | |
| | q.s. | Preservative | |
| A | 4.00 | Uvinul ® MC 80 | Ethylhexyl Methoxycinnamate |
| | 2.00 | Uvinul ® T 150 | Ethylhexyl Triazone |
| | 2.00 | Uvinul ® A Plus | Diethylamino Hydroxybenzoyl Hexyl Benzoate |
| | 0.80 | Rylo PG 11 | Polyglyceryl Dimer Soyate |
| | 1.00 | Span ™ 60 | Sorbitan Stearate |
| | 0.50 | Vitamin E Acetate | Tocopheryl Acetate |
| | 3.00 | Dracorin ® 100 SE | Glyceryl Stearate, PEG-100 Stearate |
| | 1.00 | Cremophor ® CO 410 | PEG-40 Hydrogenated Castor Oil |
| B | 3.00 | T-Lite ® SF | Titanium Dioxide, Alumina Hydrate, |
| | | | Dimethicone/Methicone Copolymer |
| | 1.00 | Cetiol ® SB 45 | Butyrospermum Parkii (Shea Butter) |
| | 6.50 | Finsolv ® TN | C12-15 Alkyl Benzoate |
| C | 5.00 | Butylene Glycol | Butylene Glycol |
| | 0.30 | Keltrol ® | Xanthan Gum |
| | 0.10 | Edeta BD | Disodium EDTA |
| | 0.10 | Allantoin | Allantoin |
| | 66.20 | Water demin. | Aqua dem. |
| D | 2.00 | Simulgel ® NS | Hydroxyethyl Acrylate/Sodium |
| | | | Acryloyldimethyl Taurate Copolymer, |
| | | | Squalane, Polysorbate 60 |
| | 1.00 | Keratin-binding domain- | |
| | | reactive dye 14_264 | |
| | q.s. | Preservative | |
| A | 4.00 | Uvinul ® MC 80 | Ethylhexyl Methoxycinnamate |
| | 2.00 | Uvinul T ® 150 | Ethylhexyl Triazone |
| | 2.00 | Uvinul ® A Plus | Diethylamino Hydroxybenzoyl Hexyl Benzoate |
| | 0.80 | Rylo PG 11 | Polyglyceryl Dimer Soyate |
| | 1.00 | Span ™ 60 | Sorbitan Stearate |
| | 0.50 | Vitamin E Acetate | Tocopheryl Acetate |
| | 3.00 | Dracorin ® 100 SE | Glyceryl Stearate, PEG-100 Stearate |
| | 1.00 | Cremophor ® CO 410 | PEG-40 Hydrogenated Castor Oil |
| B | 3.00 | Z-COTE ® MAX | Zinc Oxide, Diphenyl Capryl Methicone |
| | 1.00 | Cetiol ® SB 45 | Butyrospermum Parkii (Shea Butter) |
| | 6.50 | Finsolv ® TN | C12-15 Alkyl Benzoate |
| C | 5.00 | Butylene Glycol | Butylene Glycol |
| | 0.30 | Keltrol ® | Xanthan Gum |
| | 0.10 | Edeta BD | Disodium EDTA |
| | 0.10 | Allantoin | Allantoin |
| | 66.20 | Water demin. | Aqua dem. |
| D | 2.00 | Simulgel ® NS | Hydroxyethyl Acrylate/Sodium |
| | | | Acryloyldimethyl Taurate Copolymer, |
| | | | Squalane, Polysorbate 60 |
| | 1.00 | Keratin-binding domain- | |
| | | reactive dye 14_264 | |
| | q.s. | Preservative | |
| A | 4.00 | Uvinul ® MC 80 | Ethylhexyl Methoxycinnamate |
| | 1.00 | Uvinul ® T 150 | Ethylhexyl Triazone |
| | 2.00 | Parsol ® 1789 | Butyl Methoxydibenzoylmethane |
| | 0.80 | Rylo PG 11 | Polyglyceryl Dimer Soyate |
| | 1.00 | Span ™ 60 | Sorbitan Stearate |
| | 0.50 | Vitamin E Acetate | Tocopheryl Acetate |
| | 3.00 | Dracorin ® 100 SE | Glyceryl Stearate, PEG-100 Stearate |
| | 1.00 | Cremophor ® CO 410 | PEG-40 Hydrogenated Castor Oil |
| B | 3.00 | T-Lite ® SF-S | Titanium Dioxide, Silica Hydrate, Alumina |
| | | | Hydrate, Methicone/Dimethicone Copolymer |
| | 1.00 | Cetiol ® SB 45 | Butyrospermum Parkii (Shea Butter) |
| | 6.50 | Finsolv ® TN | C12-15 Alkyl Benzoate |
| C | 5.00 | Butylene Glycol | Butylene Glycol |
| | 0.30 | Keltrol ® | Xanthan Gum |
| | 0.10 | Edeta BD | Disodium EDTA |
| | 0.10 | Allantoin | Allantoin |
| | 66.70 | Water demin. | Aqua dem. |
| D | 2.00 | Simulgel ® NS | Hydroxyethyl Acrylate/Sodium |
| | | | Acryloyldimethyl Taurate Copolymer, |
| | | | Squalane, Polysorbate 60 |
| | 0.50 | Keratin-binding domain- | |
| | | reactive dye 14_264 | |
| | q.s. | Preservative | |
| A | 4.00 | Uvinul ® MC 80 | Ethylhexyl Methoxycinnamate |
| | 1.00 | Uvinul ® T 150 | Ethylhexyl Triazone |
| | 2.00 | Parsol ® 1789 | Butyl Methoxydibenzoylmethane |
| | 0.80 | Rylo PG 11 | Polyglyceryl Dimer Soyate |
| | 1.00 | Span ™ 60 | Sorbitan Stearate |
| | 0.50 | Vitamin E Acetate | Tocopheryl Acetate |
| | 3.00 | Dracorin ® 100 SE | Glyceryl Stearate, PEG-100 Stearate |
| | 1.00 | Cremophor ® CO 410 | PEG-40 Hydrogenated Castor Oil |
| B | 3.00 | Z-COTE ® MAX | Zinc Oxide, Diphenyl Capryl Methicone |
| | 1.00 | Cetiol ® SB 45 | Butyrospermum Parkii (Shea Butter) |
| | 6.50 | Finsolv ® TN | C12-15 Alkyl Benzoate |
| C | 5.00 | Butylene Glycol | Butylene Glycol |
| | 0.30 | Keltrol ® | Xanthan Gum |
| | 0.10 | Edeta BD | Disodium EDTA |
| | 0.10 | Allantoin | Allantoin |
| | 67.10 | Water demin. | Aqua dem. |
| D | 2.00 | Simulgel NS | Hydroxyethyl Acrylate/Sodium |
| | | | Acryloyldimethyl Taurate Copolymer, |
| | | | Squalane, Polysorbate 60 |
| | 0.10 | Keratin-binding domain- | |
| | | reactive dye 14_264 | |
| | q.s. | Preservative | |
| A | 5.00 | Uvinul ® N 539 T | Octocrylene |
| | 2.00 | Parsol ® 1789 | Butyl Methoxydibenzoylmethane |
| | 0.80 | Rylo PG 11 | Polyglyceryl Dimer Soyate |
| | 1.00 | Span ™ 60 | Sorbitan Stearate |
| | 0.50 | Vitamin E Acetate | Tocopheryl Acetate |
| | 3.00 | Dracorin ® 100 SE | Glyceryl Stearate, PEG-100 Stearate |
| | 1.00 | Cremophor ® CO 410 | PEG-40 Hydrogenated Castor Oil |
| B | 3.00 | T-Lite ® SF-S | Titanium Dioxide, Silica Hydrate, Alumina |
| | | | Hydrate, Methicone/Dimethicone Copolymer |
| | 1.00 | Cetiol ® SB 45 | Butyrospermum Parkii (Shea Butter) |
| | 6.50 | Finsolv ® TN | C12-15 Alkyl Benzoate |
| C | 5.00 | Butylene Glycol | Butylene Glycol |
| | 0.30 | Keltrol ® | Xanthan Gum |
| | 0.10 | Edeta BD | Disodium EDTA |
| | 0.10 | Allantoin | Allantoin |
| | 66.20 | Water demin. | Aqua dem. |
| D | 2.00 | Simulgel ® NS | Hydroxyethyl Acrylate/Sodium |
| | | | Acryloyldimethyl Taurate Copolymer, |
| | | | Squalane, Polysorbate 60 |
| | 1.00 | Keratin-binding domain- | |
| | | reactive dye 14_264 | |
| | q.s. | Preservative | |
| A | 5.00 | Uvinul N ® 539 T | Octocrylene |
| | 2.00 | Uvinul ® A Plus | Diethylamino Hydroxybenzoyl Hexyl Benzoate |
| | 0.80 | Rylo PG 11 | Polyglyceryl Dimer Soyate |
| | 1.00 | Span ™ 60 | Sorbitan Stearate |
| | 0.50 | Vitamin E Acetate | Tocopheryl Acetate |
| | 3.00 | Dracorin ® 100 SE | Glyceryl Stearate, PEG-100 Stearate |
| | 1.00 | Cremophor ® CO 410 | PEG-40 Hydrogenated Castor Oil |
| B | 3.00 | T-Lite ® SF | Titanium Dioxide, Alumina Hydrate, |
| | | | Dimethicone/Methicone Copolymer |
| | 1.00 | Cetiol ® SB 45 | Butyrospermum Parkii (Shea Butter) |
| | 6.50 | Finsolv ® TN | C12-15 Alkyl Benzoate |
| C | 5.00 | Butylene Glycol | Butylene Glycol |
| | 0.30 | Keltrol ® | Xanthan Gum |
| | 0.10 | Edeta BD | Disodium EDTA |
| | 0.10 | Allantoin | Allantoin |
| | 65.20 | Water demin. | Aqua dem. |
| D | 2.00 | Simulgel ® NS | Hydroxyethyl Acrylate/Sodium |
| | | | Acryloyldimethyl Taurate Copolymer, |
| | | | Squalane, Polysorbate 60 |
| | 2.00 | Keratin-binding domain- | |
| | | reactive dye 14_264 | |
| | q.s. | Preservative | |
| A | 5.00 | Uvinul ® N 539 T | Octocrylene |
| | 2.00 | Uvinul ® A Plus | Diethylamino Hydroxybenzoyl Hexyl |
| | | | Benzoate |
| | 0.80 | Rylo PG 11 | Polyglyceryl Dimer Soyate |
| | 1.00 | Span ™ 60 | Sorbitan Stearate |
| | 0.50 | Vitamin E Acetate | Tocopheryl Acetate |
| | 3.00 | Dracorin ® 100 SE | Glyceryl Stearate, PEG-100 Stearate |
| | 1.00 | Cremophor ® CO 410 | PEG-40 Hydrogenated Castor Oil |
| B | 3.00 | Z-COTE ® MAX | Zinc Oxide, Diphenyl Capryl Methicone |
| | 1.00 | Cetiol ® SB 45 | Butyrospermum Parkii (Shea Butter) |
| | 6.50 | Finsolv ® TN | C12-15 Alkyl Benzoate |
| C | 5.00 | Butylene Glycol | Butylene Glycol |
| | 0.30 | Keltrol ® | Xanthan Gum |
| | 0.10 | Edeta BD | Disodium EDTA |
| | 0.10 | Allantoin | Allantoin |
| | 66.70 | Water demin. | Aqua dem. |
| D | 2.00 | Simulgel ® NS | Hydroxyethyl Acrylate/Sodium |
| | | | Acryloyldimethyl Taurate Copolymer, |
| | | | Squalane, Polysorbate 60 |
| | 0.50 | Keratin-binding domain- | |
| | | reactive dye 14_264 | |
| | q.s. | Preservative | |
| A | 5.00 | Uvinul ® N 539 T | Octocrylene |
| | 2.00 | Uvinul ® A Plus | Diethylamino Hydroxybenzoyl Hexyl Benzoate |
| | 0.80 | Rylo PG 11 | Polyglyceryl Dimer Soyate |
| | 1.00 | Span ™ 60 | Sorbitan Stearate |
| | 0.50 | Vitamin E Acetate | Tocopheryl Acetate |
| | 3.00 | Dracorin ® 100 SE | Glyceryl Stearate, PEG-100 Stearate |
| | 1.00 | Cremophor ® CO 410 | PEG-40 Hydrogenated Castor Oil |
| B | 3.00 | Z-COTE ® MAX | Zinc Oxide, Diphenyl Capryl Methicone |
| | 1.00 | Cetiol ® SB 45 | Butyrospermum Parkii (Shea Butter) |
| | 6.50 | Finsolv ® TN | C12-15 Alkyl Benzoate |
| C | 5.00 | Butylene Glycol | Butylene Glycol |
| | 0.30 | Keltrol ® | Xanthan Gum |
| | 0.10 | Edeta BD | Disodium EDTA |
| | 0.10 | Allantoin | Allantoin |
| | 2.0 | Mexoryl ® SX | Terephthalidene Dicamphor Sulfonic Acid |
| | 66.20 | Water demin. | Aqua dem. |
| D | 2.00 | Simulgel ® NS | Hydroxyethyl Acrylate/Sodium |
| | | | Acryloyldimethyl Taurate Copolymer, |
| | | | Squalane, Polysorbate 60 |
| | 1.00 | Keratin-binding domain- | |
| | | reactive dye 14_264 | |
| | q.s. | Preservative | |
| A | 5.00 | Uvinul ® N 539 T | Octocrylene |
| | 2.00 | Uvinul ® A Plus | Diethylamino Hydrobenzoyl Hexyl Benzoate |
| | 0.80 | Rylo PG 11 | Polyglyceryl Dimer Soyate |
| | 1.00 | Span ™ 60 | Sorbitan Stearate |
| | 0.50 | Vitamin E Acetate | Tocopheryl Acetate |
| | 3.00 | Dracorin ® 100 SE | Glyceryl Stearate, PEG-100 Stearate |
| | 1.00 | Cremophor ® CO 410 | PEG-40 Hydrogenated Castor Oil |
| B | 3.00 | Z-COTE ® MAX | Zinc Oxide, Diphenyl Capryl Methicone |
| | 1.00 | Cetiol ® SB 45 | Butyrospermum Parkii (Shea Butter) |
| | 6.50 | Finsolv ® TN | C12-15 Alkyl Benzoate |
| C | 5.00 | Butylene Glycol | Butylene Glycol |
| | 0.30 | Keltrol ® | Xanthan Gum |
| | 0.10 | Edeta BD | Disodium EDTA |
| | 0.10 | Allantoin | Allantoin |
| | 2.0 | Mexoryl ® SX | Terephthalidene Dicamphor Sulfonic Acid |
| | 65.20 | Water demin. | Aqua dem. |
| D | 2.00 | Simulgel ® NS | Hydroxyethyl Acrylate/Sodium |
| | | | Acryloyldimethyl Taurate Copolymer, |
| | | | Squalane, Polysorbate 60 |
| | 2.00 | Keratin-binding domain- | |
| | | reactive dye 14_264 | |
| | q.s. | Preservative | |
| A | 5.00 | Uvinul ® N 539 T | Octocrylene |
| | 2.00 | Uvinul ® A Plus | Diethylamino Hydroxybenzoyl Hexyl |
| | | | Benzoate |
| | 2.00 | Mexoryl ® XL | Drometrizole Trisiloxane |
| | 0.80 | Rylo PG 11 | Polyglyceryl Dimer Soyate |
| | 1.00 | Span ™ 60 | Sorbitan Stearate |
| | 0.50 | Vitamin E Acetate | Tocopheryl Acetate |
| | 3.00 | Dracorin ® 100 SE | Glyceryl Stearate, PEG-100 Stearate |
| | 1.00 | Cremophor ® CO 410 | PEG-40 Hydrogenated Castor Oil |
| B | 3.00 | Z-COTE ® MAX | Zinc Oxide, Diphenyl Capryl Methicone |
| | 1.00 | Cetiol ® SB 45 | Butyrospermum Parkii (Shea Butter) |
| | 6.50 | Finsolv ® TN | C12-15 Alkyl Benzoate |
| C | 5.00 | Butylene Glycol | Butylene Glycol |
| | 0.30 | Keltrol ® | Xanthan Gum |
| | 0.10 | Edeta BD | Disodium EDTA |
| | 0.10 | Allantoin | Allantoin |
| | 67.10 | Water demin. | Aqua dem. |
| D | 2.00 | Simulgel ® NS | Hydroxyethyl Acrylate/Sodium |
| | | | Acryloyldimethyl Taurate Copolymer, |
| | | | Squalane, Polysorbate 60 |
| | 0.10 | Keratin-binding domain- | |
| | | reactive dye 14_264 | |
| | q.s. | Preservative | |
| A | 5.00 | Uvinul ® N 539 T | Octocrylene |
| | 2.00 | Tinosorb ® S | Bis-Ethylhexyloxyphenol Methoxyphenyl |
| | | | Triazine |
| | 0.80 | Rylo PG 11 | Polyglyceryl Dimer Soyate |
| | 1.00 | Span ™ 60 | Sorbitan Stearate |
| | 0.50 | Vitamin E Acetate | Tocopheryl Acetate |
| | 3.00 | Dracorin ® 100 SE | Glyceryl Stearate, PEG-100 Stearate |
| | 1.00 | Cremophor ® CO 410 | PEG-40 Hydrogenated Castor Oil |
| B | 3.00 | Z-COTE ® MAX | Zinc Oxide, Diphenyl Capryl Methicone |
| | 1.00 | Cetiol ® SB 45 | Butyrospermum Parkii (Shea Butter) |
| | 6.50 | Finsolv ® TN | C12-15 Alkyl Benzoate |
| C | 5.00 | Butylene Glycol | Butylene Glycol |
| | 0.30 | Keltrol ® | Xanthan Gum |
| | 0.10 | Edeta BD | Disodium EDTA |
| | 0.10 | Allantoin | Allantoin |
| | 66.20 | Water demin. | Aqua dem. |
| D | 2.00 | Simulgel ® NS | Hydroxyethyl Acrylate/Sodium |
| | | | Acryloyldimethyl Taurate Copolymer, |
| | | | Squalane, Polysorbate 60 |
| | 1.00 | Keratin-binding domain- | |
| | | reactive dye 14_264 | |
| | q.s. | Preservative | |
| A | 7.50 | Uvinul ® MC 80 | Ethylhexyl Methoxycinnamate |
| | 5.00 | Uvinul ® N 539 T | Octocrylene |
| | 3.00 | Emulgade ® PL 68/50 | Cetearyl Glucoside, Cetearyl Alcohol |
| | 2.00 | Dracorin ® 100 SE | Glyceryl Stearate, PEG-100 Stearate |
| | 1.00 | Fitoderm | Squalane |
| | 0.50 | Cremophor ® WO 7 | PEG-7 Hydrogenated Castor Oil |
| | 0.50 | Cremophor ® PS 20 | Polysorbate 20 |
| | 2.00 | Dry Flo Pure | Aluminum Starch Octenylsuccinate |
| B | 5.00 | Z-COTE ® MAX | Zinc Oxide, Diphenyl Capryl |
| | | | Methicone |
| C | 4.00 | 1.2-Propylene Glykol Care | Propylene Glycol |
| | 0.20 | Keltrol ® | Xanthan Gum |
| | 0.50 | Simulgel ® 600 | Acrylamide/Sodium |
| | | | Acryloyldimethyltaurate Copolymer, |
| | | | Isohexadecane, Polysorbate 80 |
| | 65.30 | Water demin. | Aqua dem. |
| | q.s. | Preservative | |
| | 0.50 | Vitamin E Acetate | Tocopheryl Acetate |
| | 2.00 | Keratin-binding domain-reactive | |
| | | dye 14_264 | |
| | 1.00 | RetiSTAR ™ | Caprylic/Capric Triglyceride, Sodium |
| | | | Ascorbate, Tocopherol, Retinol |
| A | 7.50 | Uvinul ® MC 80 | Ethylhexyl Methoxycinnamate |
| | 2.00 | Uvinul ® N 539 T | Octocrylene |
| | 3.00 | Emulgade ® PL 68/50 | Cetearyl Glucoside, Cetearyl Alcohol |
| | 2.00 | Dracorin ® 100 SE | Glyceryl Stearate, PEG-100 Stearate |
| | 1.00 | Fitoderm | Squalane |
| | 0.50 | Cremophor ® WO 7 | PEG-7 Hydrogenated Castor Oil |
| | 0.50 | Cremophor ® PS 20 | Polysorbate 20 |
| | 2.00 | Dry Flo Pure | Aluminum Starch Octenylsuccinate |
| B | 5.00 | T-Lite ® SF-S | Titanium Dioxide, Silica Hydrate, |
| | | | Alumina Hydrate, |
| | | | Methicone/Dimethicone Copolymer |
| C | 4.00 | 1,2-Propylene Glycol Care | Propylene Glycol |
| | 0.20 | Keltrol ® | Xanthan Gum |
| | 0.50 | Simulgel ® 600 | Acrylamide/Sodium |
| | | | Acryloyldimethyltaurate Copolymer, |
| | | | Isohexadecane, Polysorbate 80 |
| | 68.3 | Water demin. | Aqua dem. |
| | q.s. | Preservative | |
| | 0.50 | Vitamin E Acetate | Tocopheryl Acetate |
| | 1.00 | Keratin-binding domain-reactive | |
| | | dye 14_264 | |
| | 2.00 | RetiSTAR ™ | Caprylic/Capric Triglyceride, Sodium |
| | | | Ascorbate, Tocopherol, Retinol |
| A | 7.50 | Uvinul ® MC 80 | Ethylhexyl Methoxycinnamate |
| | 5.00 | Uvinul ® N 539 T | Octocrylene |
| | 3.00 | Emulgade ® PL 68/50 | Cetearyl Glucoside, Cetearyl Alcohol |
| | 2.00 | Dracorin ® 100 SE | Glyceryl Stearate, PEG-100 Stearate |
| | 1.00 | Fitoderm | Squalane |
| | 0.50 | Cremophor ® WO 7 | PEG-7 Hydrogenated Castor Oil |
| | 0.50 | Cremophor ® PS 20 | Polysorbate 20 |
| | 2.00 | Dry Flo Pure | Aluminum Starch Octenylsuccinate |
| B | 5.00 | T-Lite ® SF | Titanium Dioxide, Alumina Hydrate, |
| | | | Dimethicone/Methicone Copolymer |
| C | 4.00 | 1,2-Propylene Glycol Care | Propylene Glycol |
| | 1.00 | D-Panthenol 50 P | Panthenol, Propylene Glycol |
| | 0.20 | Keltrol ® | Xanthan Gum |
| | 0.50 | Simulgel ® 600 | Acrylamide/Sodium |
| | | | Acryloyldimethyltaurate Copolymer, |
| | | | Isohexadecane, Polysorbate 80 |
| | 65.30 | Water demin. | Aqua dem. |
| | q.s. | Preservative | |
| | 0.50 | Vitamin E Acetate | Tocopheryl Acetate |
| | 1.00 | Keratin-binding domain-reactive | |
| | | dye 14_264 | |
| | 1.00 | RetiSTAR ™ | Caprylic/Capric Triglyceride, Sodium |
| | | | Ascorbate, Tocopherol, Retinol |
| A | 5.50 | Uvinul ® MC 80 | Ethylhexyl Methoxycinnamate |
| | 2.00 | Uvinul ® A Plus | Diethylamino Hydroxybenzoyl Hexyl |
| | | | Benzoate |
| | 3.00 | Uvinul ® N 539 T | Octocrylene |
| | 3.00 | Emulgade ® PL 68/50 | Cetearyl Glucoside, Cetearyl Alcohol |
| | 2.00 | Dracorin ® 100 SE | Glyceryl Stearate, PEG-100 Stearate |
| | 1.00 | Fitoderm | Squalane |
| | 0.50 | Cremophor ® WO 7 | PEG-7 Hydrogenated Castor Oil |
| | 0.50 | Cremophor ® PS 20 | Polysorbate 20 |
| | 2.00 | Dry Flo Pure | Aluminum Starch Octenylsuccinate |
| B | 5.00 | T-Lite ® SF | Titanium Dioxide, Alumina Hydrate, |
| | | | Dimethicone/Methicone Copolymer |
| C | 4.00 | 1,2-Propylene Glycol Care | Propylene Glycol |
| | 0.20 | Keltrol ® | Xanthan Gum |
| | 0.50 | Simulgel ® 600 | Acrylamide/Sodium |
| | | | Acryloyldimethyltaurate Copolymer, |
| | | | Isohexadecane, Polysorbate 80 |
| | 67.30 | Water demin. | Aqua dem. |
| | q.s. | Preservative | |
| | 0.50 | Vitamin E Acetate | Tocopheryl Acetate |
| | 2.00 | Keratin-binding domain-reactive | |
| | | dye 14_264 | |
| | 1.00 | RetiSTAR ™ | Caprylic/Capric Triglyceride, Sodium |
| | | | Ascorbate, Tocopherol, Retinol |
| A | 1.00 | Abil ® Care 85 | Bis-PEG/PPG-16/16 PEG/PPG-16/16 |
| | | | Dimethicone, Caprylic/Capric |
| | | | Triglyceride |
| | 3.00 | Cremophor ® CO 40 | PEG-40 Hydrogenated Castor Oil |
| | 0.30 | Cremophor ® WO 7 | PEG-7 Hydrogenated Castor Oil |
| | 2.00 | Parsol 1789 | Butyl Methoxydibenzoylmethane |
| | 2.00 | Mexoryl ® XL | Drometrizole Trisiloxane |
| | 10.00 | Witconol APM | PPG-3 Myristyl Ether |
| | 1.00 | Uvinul ® T 150 | Ethylhexyl Triazone |
| | 1.00 | Dow Corning 345 Fluid | Cyclopentasiloxane, Cyclohexasiloxane |
| | 5.00 | Uvinul ® N 539 T | Octocrylene |
| B | 3.00 | Z-COTE ® MAX | Zinc Oxide, Diphenyl Capryl Methicone |
| C | 5.00 | 1,2-Propylene Glykol | Propylene Glycol |
| | 1.00 | Mexoryl ® SX | Terephthalidene Dicamphor Sulfonic |
| | | | Acid |
| | 0.20 | Keltrol ® | Xanthan Gum |
| | 0.06 | Edeta BD | Disodium EDTA |
| | 0.04 | TEA | Triethanolamine |
| | 0.30 | Carbopol ® Ultrez 10P | Carbomer |
| | 63.50 | Water demin. | Aqua dem. |
| | 1.00 | Keratin-binding domain-reactive | |
| | | dye 14_264 | |
| D | q.s. | Perfume oil | |
| | 0.50 | Glydant | DMDM Hydantoin |
| A | 5.50 | Uvinul ® MC 80 | Ethylhexyl Methoxycinnamate |
| | 2.00 | Uvinul ® A Plus | Diethylamino Hydroxybenzoyl Hexyl |
| | | | Benzoate |
| | 3.00 | Uvinul ® N 539 T | Octocrylene |
| | 3.00 | Emulgade ® PL 68/50 | Cetearyl Glucoside, Cetearyl Alcohol |
| | 2.00 | Dracorin ® 100 SE | Glyceryl Stearate, PEG-100 Stearate |
| | 1.00 | Fitoderm | Squalane |
| | 0.50 | Cremophor ® WO 7 | PEG-7 Hydrogenated Castor Oil |
| | 0.50 | Cremophor ® PS 20 | Polysorbate 20 |
| | 2.00 | Dry Flo Pure | Aluminum Starch Octenylsuccinate |
| B | 5.00 | T-Lite ® SF-S | Titanium Dioxide, Silica Hydrate, |
| | | | Alumina Hydrate, |
| | | | Methicone/Dimethicone Copolymer |
| C | 4.00 | 1,2-Propylene Glycol Care | Propylene Glycol |
| | 0.20 | Keltrol ® | Xanthan Gum |
| | 2.00 | Simulgel ® NS | Hydroxyethyl Acrylate/Sodium |
| | | | Acryloyldimethyl Taurate Copolymer, |
| | | | Squalane, Polysorbate 60 |
| | 66.30 | Water demin. | Aqua dem. |
| | q.s. | Preservative | |
| | 0.50 | Vitamin E Acetate | Tocopheryl Acetate |
| | 0.50 | Keratin-binding domain-reactive | |
| | | dye 14_264 | |
| | 1.00 | RetiSTAR ™ | Caprylic/Capric Triglyceride, Sodium |
| | | | Ascorbate, Tocopherol, Retinol |
| A | 2.00 | Cremophor ® A 6 | Ceteareth-6, Stearyl Alcohol |
| | 2.00 | Cremophor ® A 25 | Ceteareth-25 |
| | 3.00 | Syncrowax HRC | Tribehenin |
| | 2.00 | Lanette O | Cetearyl Alcohol |
| | 2.00 | Luvitol ® EHO | Cetearyl Ethylhexanoate |
| | 5.00 | Uvinul ® MC 80 | Ethylhexyl Methoxycinnamate |
| | 1.00 | Ganex ® V-220 | VP/Eicosene Copolymer |
| | 7.00 | Isopropyl Palmitate | Isopropyl Palmitate |
| B | 3.00 | Z-COTE ® MAX | Zinc Oxide, Diphenyl Capryl |
| | | | Methicone |
| C | 0.20 | Keltrol ® | Xanthan Gum |
| | 0.50 | Simulgel ® NS | Hydroxyethyl Acrylate/Sodium |
| | | | Acryloyldimethyl Taurate Copolymer, |
| | | | Squalane, Polysorbate 60 |
| | 65.10 | Water demin. | Aqua dem. |
| | 0.20 | Edeta BD | Disodium EDTA |
| | 5.00 | 1,2-Propylene Glycol Care | Propylene Glycol |
| | 0.50 | Keratin-binding domain-reactive dye | |
| | | 14_264 | |
| D | 1.00 | Vitamin E Acetate | Tocopheryl Acetate |
| | q.s. | Preservative | |
| A | 2.00 | Cremophor ® A 6 | Ceteareth-6, Stearyl Alcohol |
| | 2.00 | Cremophor ® A 25 | Ceteareth-25 |
| | 3.00 | Syncrowax HRC | Tribehenin |
| | 2.00 | Lanette O | Cetearyl Alcohol |
| | 2.00 | Luvitol ® EHO | Cetearyl Ethylhexanoate |
| | 5.00 | Uvinul ® MC 80 | Ethylhexyl Methoxycinnamate |
| | 1.00 | Ganex ® V-220 | VP/Eicosene Copolymer |
| | 7.00 | Isopropyl Palmitate | Isopropyl Palmitate |
| B | 3.00 | T-Lite ® SF | Titanium Dioxide, Alumina Hydrate, |
| | | | Dimethicone/Methicone Copolymer |
| C | 0.50 | Keltrol ® | Xanthan Gum |
| | 0.50 | Simulgel ® NS | Hydroxyethyl Acrylate/Sodium |
| | | | Acryloyldimethyl Taurate Copolymer, |
| | | | Squalane, Polysorbate 60 |
| | 65.10 | Water demin. | Aqua dem. |
| | 0.20 | Edeta BD | Disodium EDTA |
| | 5.00 | 1,2-Propylene Glycol Care | Propylene Glycol |
| | 0.50 | Keratin-binding domain-reactive dye | |
| | | 14_264 | |
| D | 1.00 | Vitamin E Acetate | Tocopheryl Acetate |
| | q.s. | Preservative | |
| A | 2.00 | Cremophor ® A 6 | Ceteareth-6, Stearyl Alcohol |
| | 2.00 | Cremophor ® A 25 | Ceteareth-25 |
| | 3.00 | Syncrowax HRC | Tribehenin |
| | 2.00 | Lanette O | Cetearyl Alcohol |
| | 2.00 | Luvitol ® EHO | Cetearyl Ethylhexanoate |
| | 5.00 | Uvinul ® MC 80 | Ethylhexyl Methoxycinnamate |
| | 1.00 | Ganex ® V-220 | VP/Eicosene Copolymer |
| | 7.00 | Isopropyl Palmitate | Isopropyl Palmitate |
| B | 3.00 | T-Lite ® SF-S | Titanium Dioxide, Silica Hydrate, |
| | | | Alumina Hydrate, |
| | | | Methicone/Dimethicone Copolymer |
| C | 0.50 | Keltrol ® | Xanthan Gum |
| | 0.50 | Simulgel ® NS | Hydroxyethyl Acrylate/Sodium |
| | | | Acryloyldimethyl Taurate Copolymer, |
| | | | Squalane, Polysorbate 60 |
| | 64.60 | Water demin. | Aqua dem. |
| | 0.20 | Edeta BD | Disodium EDTA |
| | 5.00 | 1,2-Propylene Glycol Care | Propylene Glycol |
| | 1.00 | Keratin-binding domain-reactive dye | |
| | | 14_264 | |
| D | 1.00 | Vitamin E Acetate | Tocopheryl Acetate |
| | q.s. | Preservative | |
| A | 2.00 | Cremophor ® A 6 | Ceteareth-6, Stearyl Alcohol |
| | 2.00 | Cremophor ® A 25 | Ceteareth-25 |
| | 3.00 | Syncrowax HRC | Tribehenin |
| | 2.00 | Lanette O | Cetearyl Alcohol |
| | 2.00 | Luvitol ® EHO | Cetearyl Ethylhexanoate |
| | 5.00 | Uvinul ® MC 80 | Ethylhexyl Methoxycinnamate |
| | 1.00 | Ganex ® V-220 | VP/Eicosene Copolymer |
| | 7.00 | Isopropyl Palmitate | Isopropyl Palmitate |
| B | 3.00 | T-Lite ® SF-S | Titanium Dioxide, Silica Hydrate, |
| | | | Alumina Hydrate, |
| | | | Methicone/Dimethicone Copolymer |
| C | 0.50 | Keltrol ® | Xanthan Gum |
| | 0.50 | Simulgel ® NS | Hydroxyethyl Acrylate/Sodium |
| | | | Acryloyldimethyl Taurate Copolymer, |
| | | | Squalane, Polysorbate 60 |
| | 64.10 | Water demin. | Aqua dem. |
| | 2.00 | Neo Heliopan ® AP | Disodium Phenyl Dibenzimidazole |
| | | | Tetrasulfonate |
| | 0.20 | Edeta BD | Disodium EDTA |
| | 5.00 | 1,2-Propylene Glycol Care | Propylene Glycol |
| D | 1.00 | Vitamin E Acetate | Tocopheryl Acetate |
| | 1.00 | Keratin-binding domain-reactive dye | |
| | | 14_264 | |
| | q.s. | Preservative | |
| A | 2.00 | Cremophor ® A 6 | Ceteareth-6, Stearyl Alcohol |
| | 2.00 | Cremophor ® A 25 | Ceteareth-25 |
| | 3.00 | Syncrowax HRC | Tribehenin |
| | 2.00 | Lanette O | Cetearyl Alcohol |
| | 2.00 | Luvitol ® EHO | Cetearyl Ethylhexanoate |
| | 7.00 | Uvinul ® N 539 T | Octocrylene |
| | 1.00 | Ganex ® V-220 | VP/Eicosene Copolymer |
| | 7.00 | Isopropyl Palmitate | Isopropyl Palmitate |
| B | 3.00 | T-Lite ® SF-S | Titanium Dioxide, Silica Hydrate, |
| | | | Alumina Hydrate, |
| | | | Methicone/Dimethicone Copolymer |
| C | 0.50 | Keltrol ® | Xanthan Gum |
| | 0.50 | Simulgel ® NS | Hydroxyethyl Acrylate/Sodium |
| | | | Acryloyldimethyl Taurate Copolymer, |
| | | | Squalane, Polysorbate 60 |
| | 64.60 | Water demin. | Aqua dem. |
| | 1.00 | Mexoryl ® SX | Terephthalidene Dicamphor Sulfonic |
| | | | Acid |
| | 0.20 | Edeta BD | Disodium EDTA |
| | 5.00 | 1,2-Propylene Glycol Care | Propylene Glycol |
| D | 1.00 | Vitamin E Acetate | Tocopheryl Acetate |
| | 1.00 | Keratin-binding domain-reactive dye | |
| | | 14_264 | |
| | q.s. | Preservative | |
| A | 2.00 | Cremophor ® A 6 | Ceteareth-6, Stearyl Alcohol |
| | 2.00 | Cremophor ® A 25 | Ceteareth-25 |
| | 3.00 | Syncrowax HRC | Tribehenin |
| | 2.00 | Lanette O | Cetearyl Alcohol |
| | 2.00 | Luvitol ® EHO | Cetearyl Ethylhexanoate |
| | 2.00 | Mexoryl ® XL | Drometrizole Trisiloxane |
| | 5.00 | Uvinul ® N 539 T | Octocrylene |
| | 1.00 | Ganex ® V-220 | VP/Eicosene Copolymer |
| | 7.00 | Isopropyl Palmitate | Isopropyl Palmitate |
| B | 3.00 | T-Lite ® SF | Titanium Dioxide, Alumina Hydrate, |
| | | | Dimethicone/Methicone Copolymer |
| C | 0.50 | Keltrol ® | Xanthan Gum |
| | 0.50 | Simulgel ® NS | Hydroxyethyl Acrylate/Sodium |
| | | | Acryloyldimethyl Taurate Copolymer, |
| | | | Squalane, Polysorbate 60 |
| | 65.10 | Water demin. | Aqua dem. |
| | 0.20 | Edeta BD | Disodium EDTA |
| | 5.00 | 1,2-Propylene Glycol Care | Propylene Glycol |
| D | 1.00 | Vitamin E Acetate | Tocopheryl Acetate |
| | 0.50 | Keratin-binding domain-reactive dye | |
| | | 14_264 | |
| | q.s. | Preservative | |
| | 1.00 | Urea | Urea |
| | 2.00 | Neo Heliopan ® AP | Disodium Phenyl Dibenzimidazole |
| | | | Tetrasulfonate |
| | 2.00 | Glycerin 87% | Glycerin |
| | 1.20 | Aristoflex ™ AVC | Ammonium Acryloyldimethyl |
| | | | Taurate/VP Copolymer |
| | 71.30 | Water demin. | Aqua dem. |
| B | 3.00 | Cremophor ® CO 40 | PEG-40 Hydrogenated Castor Oil |
| | q.s. | Perfume oil | |
| | 5.00 | Miglyol 812 | Caprylic/Capric Triglyceride |
| | 2.00 | Uvinul ® N 539 T | Octocrylene |
| | 8.00 | Z-COTE ® MAX | Zinc Oxide, Diphenyl Capryl |
| | | | Methicone |
| | 5.00 | Keratin-binding domain-reactive dye | |
| | | 14 264 | |
| | q.s. | Preservative | |
| | 5.00 | Z-COTE ® MAX | Zinc Oxide, Diphenyl Capryl |
| | | | Methicone |
| | 2.00 | Parsol ® 1789 | Butyl Methoxydibenzoylmethane |
| | 1.00 | Uvinul ® T 150 | Ethylhexyl Triazone |
| | 5.00 | Uvinul ® MC 80 | Ethylhexyl Methoxycinnamate |
| | 2.00 | Uvinul ® T 539 N | Octocrylene |
| | 0.50 | Abil ® 350 | Dimethicone |
| | 2.75 | Carnico wax LT 20 | Copernica Cerifera (Carnauba) Wax, |
| | | | Paraffin |
| | 3.70 | Candelilla wax LT 281 LJ | Euphorbia Cerifera (Candelilla) Wax |
| | 1.80 | Beeswax 3050 PH | Beeswax |
| | 3.20 | TeCero wax 30445 | Microcrystalline Wax |
| | 3.20 | TeCero wax 1030 K | Microcrystalline Wax |
| | 1.34 | Cutina CP | Cetyl Palmitate |
| | 6.40 | Vaseline | Petrolatum |
| | 7.30 | Softisan 100 | Hydrogenated Cocoglycerides |
| | 10.00 | Luvitol ® EHO | Cetearyl Ethylhexanoate |
| | 0.17 | Bisabolol nat. | Bisabolol |
| | 1.84 | Vitamin E Acetate | Tocopheryl Acetate |
| | 0.42 | D,L-Alpha-Tocopherol | Tocopherol |
| | 1.00 | Keratin-binding domain-reactive dye | |
| | | 14_264 | |
| | 40.38 | Castor Oil | Ricinus Communis (Castor) Oil |
| | 5.00 | T-Lite ® SF | Titanium Dioxide, Alumina Hydrate, |
| | | | Dimethicone/Methicone Copolymer |
| | 2.00 | Parsol ® 1789 | Butyl Methoxydibenzoylmethane |
| | 1.00 | Uvinul ® T 150 | Ethylhexyl Triazone |
| | 3.00 | Uvinul ® MC 80 | Ethylhexyl Methoxycinnamate |
| | 2.00 | Uvinul ® N 539 T | Octocrylene |
| | 0.50 | Abil ® 350 | Dimethicone |
| | 2.75 | Carnico wax LT 20 | Copernica Cerifera (Carnauba) Wax, |
| | | | Paraffin |
| | 3.70 | Candelilla wax LT 281 LJ | Euphorbia Cerifera (Candelilla) Wax |
| | 1.80 | Beeswax 3050 PH | Beeswax |
| | 3.20 | TeCero wax 30445 | Microcrystalline Wax |
| | 3.20 | TeCero wax 1030 K | Microcrystalline Wax |
| | 1.34 | Cutina CP | Cetyl Palmitate |
| | 6.40 | Vaseline | Petrolatum |
| | 7.30 | Softisan 100 | Hydrogenated Cocoglycerides |
| | 10.00 | Luvitol ® EHO | Cetearyl Ethylhexanoate |
| | 0.17 | Bisabolol nat. | Bisabolol |
| | 1.84 | Vitamin E Acetate | Tocopheryl Acetate |
| | 0.42 | D,L-Alpha-Tocopherol | Tocopherol |
| | 1.00 | Keratin-binding domain-reactive dye | |
| | | 14_264 | |
| | 40.38 | Castor Oil | Ricinus Communis (Castor) Oil |
| | 5.00 | T-Lite ® SF-S | Titanium Dioxide, Silica Hydrate. |
| | | | Alumina Hydrate, |
| | | | Methicone/Dimethicone Copolymer |
| | 2.00 | Uvinul ® A Plus | Diethylamino Hydroxybenzoyl Hexyl |
| | | | Benzoate |
| | 2.00 | Mexoryl ® XL | Drometrizole Trisiloxane |
| | 3.00 | Uvinul ® MC 80 | Ethylhexyl Methoxycinnamate |
| | 0.50 | Abil ® 350 | Dimethicone |
| | 2.75 | Carnico wax LT 20 | Copernica Cerifera (Carnauba) |
| | | | Wax, Paraffin |
| | 3.70 | Candelilla wax LT 281 LJ | Euphorbia Cerifera (Candelilla) |
| | | | Wax |
| | 1.80 | Beeswax 3050 PH | Beeswax |
| | 3.20 | TeCero wax 30445 | Microcrystalline Wax |
| | 3.20 | TeCero wax 1030 K | Microcrystalline Wax |
| | 1.34 | Cutina CP | Cetyl Palmitate |
| | 6.40 | Vaseline | Petrolatum |
| | 7.30 | Softisan 100 | Hydrogenated Cocoglycerides |
| | 10.00 | Luvitol ® EHO | Cetearyl Ethylhexanoate |
| | 0.17 | Bisabolol nat. | Bisabolol |
| | 1.84 | Vitamin E Acetate | Tocopheryl Acetate |
| | 0.42 | D,L-Alpha-Tocopherol | Tocopherol |
| | 2.00 | Keratin-binding domain-reactive dye | |
| | | 14_264 | |
| | 39.38 | Castor Oil | Ricinus Communis (Castor) Oil |
| A | 6.00 | Cremophor ® WO 7 | PEG-7 Hydrogenated Castor Oil |
| | 2.00 | Elfacos ® ST 9 | PEG-45/Dodecyl Glycol Copolymer |
| | 3.00 | Isopropyl Myristate | Isopropyl Myristate |
| | 8.00 | Jojoba oil | Simmondsia Chinensis (Jojoba) Seed |
| | | | Oil |
| | 4.00 | Uvinul ® MC 80 | Ethylhexyl Methoxycinnamate |
| | 2.00 | Uvinul ® A Plus | Diethylamino Hydroxybenzoyl Hexyl |
| | | | Benzoate |
| | 1.00 | Abil ® 350 | Dimethicone |
| B | 5.00 | Z-COTE ® MAX | Zinc Oxide, Diphenyl Capryl Methicone |
| | 3.00 | T-Lite ® SF | Titanium Dioxide, Alumina Hydrate, |
| | | | Dimethicone/Methicone Copolymer |
| C | 0.20 | Edeta BD | Disodium EDTA |
| | 5.00 | Glycerin 87% | Glycerin |
| | 0.30 | Chemag 2000 | Imidazolidinyl Urea |
| | 59.00 | Water demin. | Aqua dem. |
| D | q.s. | Perfume oil | |
| | 1.00 | Keratin-binding domain-reactive | |
| | | dye 14_264 | |
| | q.s. | Preservative | |
| | 2.00 | Cremophor ® A 6 | Ceteareth-6, Stearyl Alcohol |
| | 2.00 | Cremophor ® A 25 | Ceteareth-25 |
| | 3.00 | Syncrowax HRC | Tribehenin |
| | 2.00 | Lanette O | Cetearyl Alcohol |
| | 2.00 | Luvitol ® EHO | Cetearyl Ethylhexanoate |
| | 5.00 | Uvinul ® MC 80 | Ethylhexyl Methoxycinnamate |
| | 1.00 | Uvinul ® T 150 | Ethylhexyl Triazone |
| | 1.00 | Ganex ® V-220 | VP/Eicosene Copolymer |
| | 7.00 | Isopropyl Myristate | Isopropyl Myristate |
| B | 5.00 | Z-COTE ® MAX | Zinc Oxide, Diphenyl Capryl |
| | | | Methicone |
| C | 0.20 | Keltrol ® | Xanthan Gum |
| | 0.50 | Simulgel ® NS | Hydroxyethyl Acrylate/Sodium |
| | | | Acryloyldimethyl Taurate |
| | | | Copolymer, Squalane, |
| | | | Polysorbate 60 |
| | 61.10 | Water demin. | Aqua dem. |
| | 0.20 | Edeta BD | Disodium EDTA |
| | 5.00 | 1,2-Propylene Glycol Care | Propylene Glycol |
| D | 1.00 | Vitamin E Acetate | Tocopheryl Acetate |
| | 1.50 | Keratin-binding domain-reactive dye | |
| | | 14_264 | |
| | q.s. | Preservative | |
| A | 2.00 | Luvitol ® EHO | Cetearyl Ethylhexanoate |
| | 5.00 | Paraffin oil | Mineral Oil |
| | 5.00 | Z-COTE ® MAX | Zinc Oxide, Diphenyl Capryl |
| | | | Methicone |
| B | 1.00 | Cremophor ® A 6 | Ceteareth-6, Stearyl Alcohol |
| | 2.00 | Cremophor ® A 25 | Ceteareth-25 |
| | 3.00 | Glycerinmonostearate | Glyceryl Stearate |
| | 4.00 | Cetylstearyl alcohol | Cetearyl Alcohol |
| C | 5.00 | 1,2-Propylene Glycol Care | Propylene Glycol |
| | 7.50 | Luviquat Care | Polyquaternium-44 |
| | q.s. | Preservative | |
| | q.s. | Perfume oil | |
| | 1.00 | Keratin-binding domain-reactive dye | |
| | | 14_264 | |
| | 64.50 | Water demin. | Aqua dem. |
| | 5.00 | T-Lite ® SF | Titanium Dioxide, Alumina |
| | | | Hydrate, Dimethicone/Methicone |
| | | | Copolymer |
| | 10.00 | Z-COTE ® MAX | Zinc Oxide, Diphenyl Capryl |
| | | | Methicone |
| | 12.00 | Beeswax 3044 PH | Beeswax |
| | 8.00 | Candelilla wax LT 281 LJ | Euphorbia Cerifera (Candelilla) |
| | | | Wax |
| | 5.00 | Tegin | Glyceryl Stearate SE |
| | 5.00 | Dow Corning ® 345 Fluid | Cyclopentasiloxane, |
| | | | Cyclohexasiloxane |
| | 5.00 | Witconol ® APM | PPG-3 Myristyl Ether |
| | 5.00 | Softisan 154 | Hydrogenated Palm Oil |
| | 8.00 | Paraffin oil, high viscosity | Mineral Oil |
| | 3.00 | Vaseline | Petrolatum |
| | 2.00 | Keratin-binding domain-reactive dye | |
| | | 14_264 | |
| | 32.00 | Castor Oil | Ricinus Communis (Castor) Oil |
| | 3.00 | Uvinul ® MC 80 | Ethylhexyl Methoxycinnamate |
| | 2.00 | Uvinul ® T 150 | Ethylhexyl Triazone |
| | 2.00 | Uvinul ® A Plus | Diethylamino Hydroxybenzoyl |
| | | | Hexyl Benzoate |
| | 10.00 | Z-COTE ® MAX | Zinc Oxide, Diphenyl Capryl |
| | | | Methicone |
| | 12.00 | Beeswax 3044 PH | Beeswax |
| | 3.00 | Vaseline | Petrolatum |
| | 8.00 | Candelilla wax LT 281 LJ | Euphorbia Cerifera (Candelilla) |
| | | | Wax |
| | 8.00 | Paraffin oil, high viscosity | Mineral Oil |
| | 5.00 | Tegin | Glyceryl Stearate SE |
| | 5.00 | Softisan 154 | Hydrogenated Palm Oil |
| | 5.00 | Witconol APM | PPG-3 Myristyl Ether |
| | 5.00 | Dow Corning 345 Fluid | Cyclopentasiloxane, |
| | | | Cyclohexasiloxane |
| | 0.10 | Keratin-binding domain-reactive dye | |
| | | 14_264 | |
| | 28.90 | Castor Oil | Ricinus Communis (Castor) Oil |
| | 5.00 | T-Lite ® SF | Titanium Dioxide, Alumina |
| | | | Hydrate, Dimethicone/Methicone |
| | | | Copolymer |
| | 6.00 | Finsolv ® TN | C12-15 Alkyl Benzoate |
| | 10.00 | Uvinul ® MC 80 | Ethylhexyl Methoxycinnamate |
| | 6.00 | Miglyol ® 812 | Caprylic/Capric Triglyceride |
| | 5.00 | Arlacel ® P 135 | PEG-30 Dipolyhydroxystearate |
| | 2.00 | Ganex ® V 216 | PVP/Hexadecene Copolymer |
| | 2.00 | Elfacos ® ST 9 | PEG-45/Dodecyl Glycol |
| | | | Copolymer |
| B | 3.00 | 1,2-Propylene Glycol Care | Propylene Glycol |
| | 0.10 | Edeta BD | Disodium EDTA |
| | 1.00 | Magnesium sulfate 7-hydrate | Magnesium Sulfate |
| | 59.40 | Water demin. | Aqua dem. |
| | 0.50 | Keratin-binding domain-reactive dye | |
| | | 14_264 | |
| | q.s. | Preservative | |
| A | 4.00 | Dehymuls ® SBL | Polyglyceryl-2 |
| | | | Dipolyhydroxystearate, Dicaprylyl |
| | | | Ether, Cocoglycerides, Sorbitan |
| | | | Sesquioleate, Cera Alba, |
| | | | Aluminum Stearates, Dicocoyl |
| | | | Pentaerythrityl Distearyl Citrate |
| | 1.00 | Dehymuls ® PGPH | Polyglyceryl-2 |
| | | | Dipolyhydroxystearate |
| | 8.00 | Finsolv ® TN | C12-15 Alkyl Benzoate |
| | 4.00 | Miglyol ® 812 | Caprylic/Capric Triglyceride |
| | 4.00 | Uvinul ® MC 80 | Ethylhexyl Methoxycinnamate |
| | 2.00 | Uvinul ® N 539 T | Octocrylene |
| B | 5.00 | Z-COTE ® MAX | Zinc Oxide, Diphenyl Capryl |
| | | | Methicone |
| C | 3.00 | 1,2-Propylene Glycol Care | Propylene Glycol |
| | 0.30 | Abiol | Imidazolidinyl Urea |
| | 1.00 | Magnesium sulfate 7-hydrate | Magnesium Sulfate |
| | 66.20 | Water demin. | Aqua dem. |
| | 1.50 | Keratin-binding domain-reactive dye | |
| | | 14_264 | |
| D | q.s. | Preservative | |
| A | 4.00 | Dehymuls ® SBL | Polyglyceryl-2 |
| | | | Dipolyhydroxystearate, Dicaprylyl |
| | | | Ether, Cocoglycerides, Sorbitan |
| | | | Sesquioleate, Cera Alba, |
| | | | Aluminum Stearates, Dicocoyl |
| | | | Pentaerythrityl Distearyl Citrate |
| | 1.00 | Dehymuls ® PGPH | Polyglyceryl-2 |
| | | | Dipolyhydroxystearate |
| | 8.00 | Finsolv ® TN | C12-15 Alkyl Benzoate |
| | 4.00 | Miglyol ® 812 | Caprylic/Capric Triglyceride |
| | 4.00 | Uvinul ® MC 80 | Ethylhexyl Methoxycinnamate |
| | 2.00 | Uvinul ® N 539 T | Octocrylene |
| B | 5.00 | T-Lite ® SF-S | Titanium Dioxide, Silica Hydrate, |
| | | | Alumina Hydrate, |
| | | | Methicone/Dimethicone Copolymer |
| C | 3.00 | 1,2-Propylene Glycol Care | Propylene Glycol |
| | 0.30 | Abiol | Imidazolidinyl Urea |
| | 1.00 | Magnesium sulfate 7-hydrate | Magnesium Sulfate |
| | 1.00 | Keratin-binding domain-reactive dye | |
| | | 14_264 | |
| | 66.70 | Water demin. | Aqua dem. |
| D | q.s. | Preservative | |
| A | 4.00 | Dehymuls ® SBL | Polyglyceryl-2 |
| | | | Dipolyhydroxystearate, Dicaprylyl |
| | | | Ether, Cocoglycerides, Sorbitan |
| | | | Sesquioleate, Cera Alba, |
| | | | Aluminum Stearates, Dicocoyl |
| | | | Pentaerythrityl Distearyl Citrate |
| | 1.00 | Dehymuls ® PGPH | Polyglyceryl-2 |
| | | | Dipolyhydroxystearate |
| | 8.00 | Finsolv ® TN | C12-15 Alkyl Benzoate |
| | 4.00 | Miglyol ® 812 | Caprylic/Capric Triglyceride |
| | 8.00 | Uvinul ® A Plus B | Ethylhexyl Methoxycinnamate and |
| | | | Diethylamino Hydroxybenzoyl |
| | | | hexyl Benzoate |
| | 2.00 | Uvinul ® N 539 T | Octocrylene |
| B | 5.00 | Z-COTE ® MAX | Zinc Oxide, Diphenyl Capryl |
| | | | Methicone |
| C | 3.00 | 1,2-Propylene Glycol Care | Propylene Glycol |
| | 0.30 | Abiol | Imidazolidinyl Urea |
| | 1.00 | Magnesium sulfate 7-hydrate | Magnesium Sulfate |
| | 0.10 | Keratin-binding domain-reactive dye | |
| | | 14_264 | |
| | 63.60 | Water demin. | Aqua dem. |
| | q.s. | Preservative | |
| A | 4.00 | Dehymuls ® SBL | Polyglyceryl-2 |
| | | | Dipolyhydroxystearate, Dicaprylyl |
| | | | Ether, Cocoglycerides, Sorbitan |
| | | | Sesquioleate, Cera Alba, |
| | | | Aluminum Stearates, Dicocoyl |
| | | | Pentaerythrityl Distearyl Citrate |
| | 1.00 | Dehymuls ® PGPH | Polyglyceryl-2 |
| | | | Dipolyhydroxystearate |
| | 8.00 | Finsolv ® TN | C12-15 Alkyl Benzoate |
| | 4.00 | Miglyol ® 812 | Caprylic/Capric Triglyceride |
| | 8.00 | Uvinul ® A Plus B | Ethylhexyl Methoxycinnamate and |
| | | | Diethylamino Hydroxybenzoyl |
| | | | Hexyl Benzoate |
| | 2.00 | Uvinul ® N 539 T | Octocrylene |
| B | 5.00 | T-Lite ® SF | Titanium Dioxide, Alumina Hydrate, |
| | | | Dimethicone/Methicone Copolymer |
| C | 3.00 | 1,2-Propylene Glycol Care | Propylene Glycol |
| | 0.30 | Abiol | Imidazolidinyl Urea |
| | 1.00 | Magnesium sulfate 7-hydrate | Magnesium Sulfate |
| | 63.50 | Water demin. | Aqua dem. |
| | 0.20 | Keratin-binding domain-reactive dye | |
| | | 14_264 | |
| | q.s. | Preservative | |
| A | 4.00 | Dehymuls ® SBL | Polyglyceryl-2 |
| | | | Dipolyhydroxystearate, Dicaprylyl |
| | | | Ether, Cocoglycerides, Sorbitan |
| | | | Sesquioleate, Cera Alba, |
| | | | Aluminum Stearates, Dicocoyl |
| | | | Pentaerythrityl Distearyl Citrate |
| | 1.00 | Dehymuls ® PGPH | Polyglyceryl-2 |
| | | | Dipolyhydroxystearate |
| | 8.00 | Finsolv ® TN | C12-15 Alkyl Benzoate |
| | 4.00 | Miglyol ® 812 | Caprylic/Capric Triglyceride |
| | 8.00 | Uvinul ® A Plus B | Ethylhexyl Methoxycinnamate and |
| | | | Diethylamino Hydroxybenzoyl |
| | | | hexyl Benzoate |
| | 2.00 | Uvinul ® N 539 T | Octocrylene |
| B | 5.00 | T-Lite ® SF-S | Titanium Dioxide, Silica Hydrate, |
| | | | Alumina Hydrate, |
| | | | Methicone/Dimethicone Copolymer |
| C | 3.00 | 1,2-Propylene Glycol Care | Propylene Glycol |
| | 0.30 | Abiol | Imidazolidinyl Urea |
| | 1.00 | Magnesium sulfate 7-hydrate | Magnesium Sulfate |
| | 0.50 | Keratin-binding domain-reactive dye | |
| | | 14_264 | |
| | 63.20 | Water demin. | Aqua dem. |
| | q.s. | Preservative | |
| A | 4.00 | Dehymuls ® SBL | Polyglyceryl-2 |
| | | | Dipolyhydroxystearate, Dicaprylyl |
| | | | Ether, Cocoglycerides, Sorbitan |
| | | | Sesquioleate, Cera Alba, |
| | | | Aluminum Stearates, Dicocoyl |
| | | | Pentaerythrityl Distearyl Citrate |
| | 1.00 | Dehymuls ® PGPH | Polyglyceryl-2 |
| | | | Dipolyhydroxystearate |
| | 8.00 | Finsolv ® TN | C12-15 Alkyl Benzoate |
| | 4.00 | Miglyol ® 812 | Caprylic/Capric Triglyceride |
| | 7.00 | Uvinul ® MC 80 | Ethylhexyl Methoxycinnamate |
| | 2.00 | Mexoryl ® XL | Drometrizole Trisiloxane |
| B | 5.00 | Z-COTE ® MAX | Zinc Oxide, Diphenyl Capryl |
| | | | Methicone |
| C | 3.00 | 1,2-Propylene Glycol Care | Propylene Glycol |
| | 0.30 | Abiol | Imidazolidinyl Urea |
| | 1.00 | Magnesium sulfate 7-hydrate | Magnesium Sulfate |
| | 64.69 | Water demin. | Aqua dem. |
| | 0.01 | Keratin-binding domain-reactive dye | |
| | | 14_264 | |
| | q.s. | Preservative | |
| A | 7.50 | Uvinul ® MC 80 | Ethylhexyl Methoxycinnamate |
| | 3.00 | Uvinul ® N 539 T | Octocrylene |
| | 2.00 | Uvinul ® A Plus | Diethylamino Hydroxybenzoyl |
| | | | Hexyl Benzoate |
| | 1.00 | Cremophor ® CO 40 | PEG-40 Hydrogenated Castor Oil |
| | 10.00 | Miglyol 812 | Caprylic/Capric Triglyceride |
| | 1.50 | Dow Corning ® 345 Fluid | Cyclopentasiloxane, |
| | | | Cyclohexasiloxane |
| B | 3.50 | Luvigel ® EM | Caprylic/Capric Triglyceride, |
| | | | Sodium Acrylates Copolymer |
| C | 46.00 | Water demin. | Aqua dem. |
| D | 5.00 | 1,2-Propylene Glycol Care | Propylene Glycol |
| | 0.50 | Cremophor ® A 25 | Ceteareth-25 |
| | 0.05 | Keratin-binding domain-reactive dye | |
| | | 14_264 | |
| | 20.00 | Ethanol 96% | Alcohol |
| A | 1.00 | Uvinul ® A Plus | Diethylamino Hydroxybenzoyl |
| | | | Hexyl Benzoate |
| | 1.00 | Tinosorb ® S | Bis-Ethylhexyloxyphenol |
| | | | Methoxyphenyl Triazine |
| | 3.00 | Uvinul ® MC 80 | Ethylhexyl Methoxycinnamate |
| | 8.00 | Miglyol ® 812 | Caprylic/Capric Triglyceride |
| | 1.50 | Dow Corning ® 350 Fluid | Dimethicone |
| | 3.00 | Z-COTE ® MAX | Zinc Oxide, Diphenyl Capryl |
| | | | Methicone |
| | 3.00 | Finsolv ® TN | C12-15 Alkyl Benzoate |
| | 1.00 | Cremophor ® CO 40 | PEG-40 Hydrogenated Castor Oil |
| B | 2.00 | Luvigel ® EM | Caprylic/Capric Triglyceride, |
| | | | Sodium Acrylates Copolymer |
| C | 54.80 | Water demin. | Aqua dem. |
| D | 15.00 | Ethanol 96% | Alcohol |
| | 5.00 | 1,2-Propylene Glycol Care | Propylene Glycol |
| | 0.50 | Cremophor ® A 25 | Ceteareth-25 |
| | 1.00 | Keratin-binding domain-reactive dye | |
| | | 14_264 | |
| | 1.00 | Vitamin E Acetate | Tocopheryl Acetate |
| | 0.20 | Bisabolol rac. | Bisabolol |
| A | 4.00 | Dehymuls ® SBL | Polyglyceryl-2 |
| | | | Dipolyhydroxystearate, |
| | | | Dicaprylyl Ether, |
| | | | Cocoglycerides, Sorbitan |
| | | | Sesquioleate, Cera Alba, |
| | | | Aluminum Stearates, Dicocoyl |
| | | | Pentaerythrityl Distearyl Citrate |
| | 1.00 | Dehymuls ® PGPH | Polyglyceryl-2 |
| | | | Dipolyhydroxystearate |
| | 6.00 | Finsolv ® TN | C12-15 Alkyl Benzoate |
| | 6.00 | Miglyol ® 812 | Caprylic/Capric Triglyceride |
| | 5.00 | Uvinul ® MC 80 | Ethylhexyl Methoxycinnamate |
| | 3.00 | Neo Heliopan ® HMS | Homosalate |
| B | 5.00 | Z-COTE ® MAX | Zinc Oxide, Diphenyl Capryl |
| | | | Methicone |
| C | 3.00 | 1,2-Propylene Glycol Care | Propylene Glycol |
| | 0.30 | Chemag 2000 | Imidazolidinyl Urea |
| | 1.00 | Magnesium sulfate 7-hydrate | Magnesium Sulfate |
| | 65.10 | Water demin. | Aqua dem. |
| | 0.10 | Keratin-binding domain-reactive dye | |
| | | 14_264 | |
| | q.s. | Preservative | |
| A | 4.00 | Tego ® Care 450 | Polyglyceryl-3 Methyl Glucose |
| | | | Distearate |
| | 4.50 | Uvinul ® MC 80 | Ethylhexyl Methoxycinnamate |
| | 3.00 | Uvinul ® N 539 T | Octocrylene |
| | 2.00 | Uvinul ® T 150 | Ethylhexyl Triazone |
| | 0.50 | Vitamin E Acetate | Tocopheryl Acetate |
| B | 5.00 | Isohexadecane | Isohexadecane |
| | 5.00 | Cosmacol ® EMI | Di-C12-13 Alkyl Malate |
| | 3.50 | Cetiol ® SN | Cetearyl Isononanoate |
| | 1.00 | Ganex ® V-220 | VP/Eicosene Copolymer |
| | 5.00 | T-Lite ® SF | Titanium Dioxide, Alumina |
| | | | Hydrate, Dimethicone/Methicone |
| | | | Copolymer |
| C | 60.00 | Water demin. | Water |
| | 5.00 | Glycerin 87% | Glycerin |
| | 1.00 | Lanette E | Sodium Cetearyl Sulfate |
| | 0.30 | Keltrol ® | Xanthan Gum |
| | 0.20 | Keratin-binding domain-reactive dye | |
| | | 14 264 | |
| D | q.s. | Preservative | |
| A | 4.00 | Tego ® Care 450 | Polyglyceryl-3 Methyl Glucose |
| | | | Distearate |
| | 4.50 | Uvinul ® MC 80 | Ethylhexyl Methoxycinnamate |
| | 3.00 | Uvinul ® N 539 T | Octocrylene |
| | 2.00 | Neo Heliopan ® HMS | Homosalate |
| | 0.50 | Vitamin E Acetate | Tocopheryl Acetate |
| B | 5.00 | Isohexadecane | Isohexadecane |
| | 5.00 | Cosmacol ® EMI | Di-C12-13 Alkyl Malate |
| | 3.50 | Cetiol ® SN | Cetearyl Isononanoate |
| | 1.00 | Ganex ® V-220 | VP/Eicosene Copolymer |
| | 5.00 | T-Lite ® SF | Titanium Dioxide, Alumina |
| | | | Hydrate, |
| | | | Dimethicone/Methicone |
| | | | Copolymer |
| C | 59.20 | Water demin. | Aqua dem. |
| | 5.00 | Glycerin 87% | Glycerin |
| | 1.00 | Lanette E | Sodium Cetearyl Sulfate |
| | 0.30 | Keltrol ® | Xanthan Gum |
| | 1.00 | Keratin-binding domain-reactive dye | |
| | | 14_264 | |
| D | q.s. | Preservative | |
| A | 4.00 | Tego ® Care 450 | Polyglyceryl-3 Methyl Glucose |
| | | | Distearate |
| | 4.50 | Uvinul ® MC 80 | Ethylhexyl Methoxycinnamate |
| | 3.00 | Neo Heliopan ® OS | Octisalate |
| | 2.00 | Neo Heliopan ® HMS | Homosalate |
| | 0.50 | Vitamin E Acetate | Tocopheryl Acetate |
| B | 5.00 | Isohexadecane | Isohexadecane |
| | 5.00 | Cosmacol ® EMI | Di-C12-13 Alkyl Malate |
| | 3.50 | Cetiol ® SN | Cetearyl Isononanoate |
| | 1.00 | Ganex ® V-220 | VP/Eicosene Copolymer |
| | 5.00 | Z-COTE ® MAX | Zinc Oxide, Diphenyl Capryl |
| | | | Methicone |
| C | 60.15 | Water demin. | Aqua dem. |
| | 5.00 | Glycerin 87% | Glycerin |
| | 1.00 | Lanette E | Sodium Cetearyl Sulfate |
| | 0.30 | Keltrol ® | Xanthan Gum |
| | 0.05 | Keratin-binding domain-reactive dye | |
| | | 14_264 | |
| D | q.s. | Preservative | |
| A | 4.00 | Tego ® Care 450 | Polyglyceryl-3 Methyl Glucose |
| | | | Distearate |
| | 4.50 | Uvinul ® N 539 T | Octocrylene |
| | 3.00 | Neo Heliopan ® OS | Octisalate |
| | 2.00 | Neo Heliopan ® HMS | Homosalate |
| | 0.50 | Vitamin E Acetate | Tocopheryl Acetate |
| B | 5.00 | Isohexadecane | Isohexadecane |
| | 5.00 | Cosmacol ® EMI | Di-C12-13 Alkyl Malate |
| | 3.50 | Cetiol ® SN | Cetearyl Isononanoate |
| | 1.00 | Ganex ® V-220 | VP/Eicosene Copolymer |
| | 5.00 | Z-COTE ® MAX | Zinc Oxide, Diphenyl Capryl |
| | | | Methicone |
| C | 60.19 | Water demin. | Aqua dem. |
| | 5.00 | Glycerin 87% | Glycerin |
| | 1.00 | Lanette E | Sodium Cetearyl Sulfate |
| | 0.30 | Keltrol ® | Xanthan Gum |
| | 0.01 | Keratin-binding domain-reactive dye | |
| | | 14_264 | |
| D | q.s. | Preservative | |
| A | 4.00 | Tego ® Care 450 | Polyglyceryl-3 Methyl Glucose |
| | | | Distearate |
| | 4.50 | Uvinul ® N 539 T | Octocrylene |
| | 3.00 | Neo Heliopan ® OS | Octisalate |
| | 2.00 | Neo Heliopan ® HMS | Homosalate |
| | 0.50 | Vitamin E Acetate | Tocopheryl Acetate |
| B | 5.00 | Isohexadecane | Isohexadecane |
| | 5.00 | Cosmacol ® EMI | Di-C12-13 Alkyl Malate |
| | 3.50 | Cetiol ® SN | Cetearyl Isononanoate |
| | 1.00 | Ganex ® V-220 | VP/Eicosene Copolymer |
| | 5.00 | T-Lite ® SF-S | Titanium Dioxide, Silica |
| | | | Hydrate, Alumina Hydrate, |
| | | | Methicone/Dimethicone |
| | | | Copolymer |
| C | 59.20 | Water demin. | Aqua dem. |
| | 5.00 | Glycerin 87% | Glycerin |
| | 1.00 | Lanette E | Sodium Cetearyl Sulfate |
| | 0.30 | Keltrol ® | Xanthan Gum |
| | 1.00 | Keratin-binding domain-reactive dye | |
| | | 14_264 | |
| D | q.s. | Preservative | |
| A | 8.00 | Cetiol ® B | Dibutyl Adipate |
| | 8.00 | Finsolv ® TN | C12-15 Alkyl Benzoate |
| | 12.00 | Myritol ® 331 | Cocoglycerides |
| | 1.00 | Lanette E | Sodium Cetearyl Sulfate |
| | 4.00 | Eumulgin ® VL 75 | Lauryl Glucoside, Polyglyceryl-2 |
| | | | Dipolyhydroxystearate, Glycerin |
| | 2.00 | Lanette O | Cetearyl Alcohol |
| | 3.00 | Tinosorb ® S | Bis-Ethylhexyloxyphenol |
| | | | Methoxyphenyl Triazine |
| | 1.00 | Vitamin E Acetate | Tocopheryl Acetate |
| B | 4.00 | Z-COTE ® MAX | Zinc Oxide, Diphenyl Capryl |
| | | | Methicone |
| C | 3.00 | Glycerin 87% | Glycerin |
| | 0.05 | Edeta BD | Disodium EDTA |
| | 0.20 | Allantoin | Allantoin |
| | 0.30 | Keltrol ® | Xanthan Gum |
| | 1.50 | Veegum Ultra | Magnesium Aluminum Silicate |
| | 49.45 | Water demin. | Aqua dem. |
| | 1.00 | Keratin-binding domain-reactive dye | |
| | | 14_264 | |
| D | q.s. | Preservative | |
| A | 8.00 | Cetiol ® B | Dibutyl Adipate |
| | 8.00 | Finsolv ® TN | C12-15 Alkyl Benzoate |
| | 12.00 | Myritol ® 331 | Cocoglycerides |
| | 1.00 | Lanette E | Sodium Cetearyl Sulfate |
| | 4.00 | Eumulgin ® VL 75 | Lauryl Glucoside, Polyglyceryl-2 |
| | | | Dipolyhydroxystearate, Glycerin |
| | 2.00 | Lanette O | Cetearyl Alcohol |
| | 3.00 | Tinosorb ® S | Bis-Ethylhexyloxyphenol |
| | | | Methoxyphenyl Triazine |
| | 1.00 | Vitamin E Acetate | Tocopheryl Acetate |
| B | 4.00 | T-Lite ® SF | Titanium Dioxide, Alumina |
| | | | Hydrate, Dimethicone/Methicone |
| | | | Copolymer |
| C | 3.00 | Glycerin 87% | Glycerin |
| | 0.05 | Edeta BD | Disodium EDTA |
| | 0.20 | Allantoin | Allantoin |
| | 0.30 | Keltrol ® | Xanthan Gum |
| | 1.50 | Veegum Ultra | Magnesium Aluminum Silicate |
| | 50.25 | Water demin. | Aqua dem. |
| D | 0.50 | Citric Acid | Citric Acid |
| | q.s. | Perfume oil | |
| | 0.20 | Keratin-binding domain-reactive dye | |
| | | 14_264 | |
| | q.s. | Preservative | |
| A | 5.00 | Cosmacol ® EMI | Di-C12-13 Alkyl Malate |
| | 4.50 | Uvinul ® MC 80 | Ethylhexyl Methoxycinnamate |
| | 3.00 | Uvinul ® N 539 T | Octocrylene |
| | 2.00 | Uvinul ® T 150 | Ethylhexyl Triazone |
| B | 4.00 | Tego ® Care 450 | Polyglyceryl-3 Methyl Glucose |
| | | | Distearate |
| | 5.00 | Isohexadecane | Isohexadecane |
| | 3.50 | Cetiol ® SN | Cetearyl Isononanoate |
| | 0.50 | Vitamin E Acetate | Tocopheryl Acetate |
| | 1.00 | Ganex ® V-220 | VP/Eicosene Copolymer |
| | 2.50 | T-Lite ® SF | Titanium Dioxide, Alumina |
| | | | Hydrate, |
| | | | Dimethicone/Methicone |
| | | | Copolymer |
| C | 5.00 | Glycerin 87% | Glycerin |
| | 2.00 | Lanette E | Sodium Cetearyl Sulfate |
| | 0.30 | Keltrol ® | Xanthan Gum |
| | 1.00 | Pationic ® 138 C | Sodium Lauroyl Lactylate |
| | 1.00 | Pationic ® SSL | Sodium Stearoyl Lactylate |
| | 42.00 | Water demin. | Aqua dem. |
| D | 5.00 | Eusolex ® 232 | Phenylbenzimidazole Sulfonic |
| | | | Acid |
| | 10.00 | Water demin. | Aqua dem. |
| E | 0.70 | Sodium hydroxide | Sodium Hydroxide |
| | 1.00 | Keratin-binding domain-reactive dye | |
| | | 14_264 | |
| | q.s. | Preservative | |
| A | 5.00 | Cosmacol ® EMI | Di-C12-13 Alkyl Malate |
| | 4.50 | Uvinul ® MC 80 | Ethylhexyl Methoxycinnamate |
| | 3.00 | Uvinul ® N 539 T | Octocrylene |
| | 2.00 | Uvinul ® A Plus | Diethylamino Hydrobenzoyl |
| | | | Hexyl Benzoate |
| B | 4.00 | Tego ® Care 450 | Polyglyceryl-3 Methyl Glucose |
| | | | Distearate |
| | 5.00 | Isohexadecane | Isohexadecane |
| | 3.50 | Cetiol ® SN | Cetearyl Isononanoate |
| | 0.50 | Vitamin E Acetate | Tocopheryl Acetate |
| | 1.00 | Ganex ® V-220 | VP/Eicosene Copolymer |
| | 2.50 | T-Lite ® SF | Titanium Dioxide, Alumina |
| | | | Hydrate, |
| | | | Dimethicone/Methicone |
| | | | Copolymer |
| C | 5.00 | Glycerin 87% | Glycerin |
| | 2.00 | Lanette E | Sodium Cetearyl Sulfate |
| | 0.30 | Keltrol ® | Xanthan Gum |
| | 1.00 | Pationic ® 138 C | Sodium Lauroyl Lactylate |
| | 1.00 | Pationic ® SSL | Sodium Stearoyl Lactylate |
| | 41.00 | Water demin. | Aqua dem. |
| D | 5.00 | Eusolex ® 232 | Phenylbenzimidazole Sulfonic |
| | | | Acid |
| | 2.00 | Keratin-binding domain-reactive dye | |
| | | 14_264 | |
| | 10.00 | Water demin. | Aqua dem. |
| E | 0.70 | Sodium hydroxide | Sodium Hydroxide |
| | q.s. | Preservative | |
| A | 5.00 | Cosmacol ® EMI | Di-C12-13 Alkyl Malate |
| | 4.50 | Uvinul ® MC 80 | Ethylhexyl Methoxycinnamate |
| | 3.00 | Uvinul ® N 539 T | Octocrylene |
| | 2.00 | Uvinul ® A Plus | Diethylamino Hydrobenzoyl |
| | | | Hexyl Benzoate |
| B | 4.00 | Tego Care 450 | Polyglyceryl-3 Methyl Glucose |
| | | | Distearate |
| | 5.00 | Isohexadecane | Isohexadecane |
| | 3.50 | Cetiol ® SN | Cetearyl Isononanoate |
| | 0.50 | Vitamin E Acetate | Tocopheryl Acetate |
| | 1.00 | Ganex ® V-220 | VP/Eicosene Copolymer |
| | 2.50 | Z-COTE ® MAX | Zinc Oxide, Diphenyl Capryl |
| | | | Methicone |
| C | 5.00 | Glycerin 87% | Glycerin |
| | 2.00 | Lanette E | Sodium Cetearyl Sulfate |
| | 0.30 | Keltrol ® | Xanthan Gum |
| | 1.00 | Pationic ® 138 C | Sodium Lauroyl Lactylate |
| | 1.00 | Pationic ® SSL | Sodium Stearoyl Lactylate |
| | 42.50 | Water demin. | Aqua dem. |
| D | 5.00 | Eusolex ® 232 | Phenylbenzimidazole Sulfonic |
| | | | Acid |
| | 0.50 | Keratin-binding domain-reactive dye | |
| | | 14_264 | |
| | 10.00 | Water demin. | Aqua dem. |
| E | 0.70 | Sodium hydroxide | Sodium Hydroxide |
| | q.s. | Preservative | |
| A | 5.00 | Cosmacol ® EMI | Di-C12-13 Alkyl Malate |
| | 7.50 | Uvinul ® N 539 T | Octocrylene |
| | 2.00 | Mexoryl ® XL | Drometrizole Trisiloxane |
| B | 4.00 | Tego ® Care 450 | Polyglyceryl-3 Methyl Glucose |
| | | | Distearate |
| | 5.00 | Isohexadecane | Isohexadecane |
| | 3.50 | Cetiol ® SN | Cetearyl Isononanoate |
| | 0.50 | Vitamin E Acetate | Tocopheryl Acetate |
| | 1.00 | Ganex ® V-220 | VP/Eicosene Copolymer |
| | 5.00 | Z-COTE ® MAX | Zinc Oxide, Diphenyl Capryl |
| | | | Methicone |
| C | 5.00 | Glycerin 87% | Glycerin |
| | 2.00 | Lanette E | Sodium Cetearyl Sulfate |
| | 0.30 | Keltrol ® | Xanthan Gum |
| | 1.00 | Pationic ® 138 C | Sodium Lauroyl Lactylate |
| | 1.00 | Pationic ® SSL | Sodium Stearoyl Lactylate |
| | 40.50 | Water demin. | Aqua dem. |
| D | 5.00 | Eusolex ® 232 | Phenylbenzimidazole Sulfonic |
| | | | Acid |
| | 1.00 | Keratin-binding domain-reactive dye | |
| | | 14_264 | |
| | 10.00 | Water demin. | Aqua dem. |
| E | 0.70 | Sodium hydroxide | Sodium Hydroxide |
| | q.s. | Preservative | |
| A | 5.00 | Cosmacol ® EMI | Di-C12-13 Alkyl Malate |
| | 5.50 | Uvinul ® N 539 T | Octocrylene |
| | 2.00 | Uvinul ® A Plus | Diethylamino Hydrobenzoyl |
| | | | Hexyl Benzoate |
| | 2.00 | Mexoryl ® XL | Drometrizole Trisiloxane |
| B | 4.00 | Tego ® Care 450 | Polyglyceryl-3 Methyl Glucose |
| | | | Distearate |
| | 5.00 | Isohexadecane | Isohexadecane |
| | 3.50 | Cetiol ® SN | Cetearyl Isononanoate |
| | 0.50 | Vitamin E Acetate | Tocopheryl Acetate |
| | 1.00 | Ganex ® V-220 | VP/Eicosene Copolymer |
| | 5.00 | Z-COTE ® MAX | Zinc Oxide, Diphenyl Capryl |
| | | | Methicone |
| C | 5.00 | Glycerin 87% | Glycerin |
| | 2.00 | Lanette E | Sodium Cetearyl Sulfate |
| | 0.30 | Keltrol ® | Xanthan Gum |
| | 1.00 | Pationic ® 138 C | Sodium Lauroyl Lactylate |
| | 1.00 | Pationic ® SSL | Sodium Stearoyl Lactylate |
| | 41.50 | Water demin. | Aqua dem. |
| D | 5.00 | Eusolex ® 232 | Phenylbenzimidazole Sulfonic |
| | | | Acid |
| | 0.50 | Keratin-binding domain-reactive dye | |
| | | 14_264 | |
| | 9.50 | Water demin. | Aqua dem. |
| E | 0.70 | Sodium hydroxide | Sodium Hydroxide |
| | q.s. | Preservative | |
| A | 5.00 | Cosmacol ® EMI | Di-C12-13 Alkyl Malate |
| | 5.50 | Uvinul ® N 539 T | Octocrylene |
| | 2.00 | Uvinul ® A Plus | Diethylamino Hydrobenzoyl |
| | | | Hexyl Benzoate |
| | 2.00 | Mexoryl ® XL | Drometrizole Trisiloxane |
| B | 4.00 | Tego Care ® 450 | Polyglyceryl-3 Methyl Glucose |
| | | | Distearate |
| | 5.00 | Isohexadecane | Isohexadecane |
| | 3.50 | Cetiol ® SN | Cetearyl Isononanoate |
| | 0.50 | Vitamin E Acetate | Tocopheryl Acetate |
| | 1.00 | Ganex ® V-220 | VP/Eicosene Copolymer |
| | 5.00 | T-Lite ® SF-S | Titanium Dioxide, Silica |
| | | | Hydrate, Alumina Hydrate, |
| | | | Methicone/Dimethicone |
| | | | Copolymer |
| C | 5.00 | Glycerin 87% | Glycerin |
| | 2.00 | Lanette E | Sodium Cetearyl Sulfate |
| | 0.30 | Keltrol ® | Xanthan Gum |
| | 1.00 | Pationic ® 138 C | Sodium Lauroyl Lactylate |
| | 1.00 | Pationic ® SSL | Sodium Stearoyl Lactylate |
| | 40.50 | Water demin. | Aqua dem. |
| D | 5.00 | Eusolex ® 232 | Phenylbenzimidazole Sulfonic |
| | | | Acid |
| | 1.00 | Keratin-binding domain-reactive dye | |
| | | 14_264 | |
| | 10.00 | Water demin. | Aqua dem. |
| E | 0.70 | Sodium hydroxide | Sodium Hydroxide |
| | q.s. | Preservative | |
| A | 8.00 | Cetiol ® B | Dibutyl Adipate |
| | 8.00 | Finsolv ® TN | C12-15 Alkyl Benzoate |
| | 10.00 | Myritol ® 331 | Cocoglycerides |
| | 1.00 | Lanette E | Sodium Cetearyl Sulfate |
| | 4.00 | Eumulgin ® VL 75 | Lauryl Glucoside, Polyglyceryl-2 |
| | | | Dipolyhydroxystearate, Glycerin |
| | 2.00 | Lanette O | Cetearyl Alcohol |
| | 1.00 | Tinosorb ® S | Bis-Ethylhexyloxyphenol |
| | | | Methoxyphenyl Triazine |
| | 1.00 | Uvinul ® T 150 | Ethylhexyl Triazone |
| | 1.00 | Vitamin E Acetate | Tocopheryl Acetate |
| B | 5.00 | T-Lite ® SF | Titanium Dioxide, Alumina |
| | | | Hydrate, |
| | | | Dimethicone/Methicone |
| | | | Copolymer |
| C | 3.00 | Glycerin 87% | Glycerin |
| | 0.05 | Edeta BD | Disodium EDTA |
| | 0.20 | Allantoin | Allantoin |
| | 0.30 | Keltrol ® | Xanthan Gum |
| | 2.00 | Keratin-binding | domain-reactive dye |
| | | 14_264 | |
| | 1.50 | Veegum Ultra | Magnesium Aluminum Silicate |
| | 51.95 | Water demin. | Aqua dem. |
| D | q.s. | Perfume oil | |
| | q.s. | Preservative | |
| A | 8.00 | Cetiol ® B | Dibutyl Adipate |
| | 8.00 | Finsolv ® TN | C12-15 Alkyl Benzoate |
| | 10.00 | Myritol ® 331 | Cocoglycerides |
| | 1.00 | Lanette E | Sodium Cetearyl Sulfate |
| | 4.00 | Eumulgin ® VL 75 | Lauryl Glucoside, Polyglyceryl-2 |
| | | | Dipolyhydroxystearate, Glycerin |
| | 2.00 | Lanette O | Cetearyl Alcohol |
| | 1.00 | Tinosorb ® S | Bis-Ethylhexyloxyphenol |
| | | | Methoxyphenyl triazine |
| | 1.00 | Uvinul ® T 150 | Ethylhexyl Triazone |
| | 1.00 | Vitamin E Acetate | Tocopheryl Acetate |
| B | 5.00 | Z-COTE ® MAX | Zinc Oxide, Diphenyl Capryl |
| | | | Methicone |
| C | 3.00 | Glycerin 87% | Glycerin |
| | 0.05 | Edeta BD | Disodium EDTA |
| | 0.20 | Allantoin | Allantoin |
| | 0.30 | Keltrol ® | Xanthan Gum |
| | 1.00 | Keratin-binding domain-reactive dye | |
| | | 14_264 | |
| | 1.50 | Veegum Ultra | Magnesium Aluminum Silicate |
| | 52.95 | Water demin. | Aqua dem. |
| D | q.s. | Perfume oil | |
| | q.s. | Preservative | |
| A | 3.00 | Glycerin 87% | Glycerin |
| | 0.20 | Edeta BD | Disodium EDTA |
| | 0.30 | Abiol | Imidazolidinyl Urea |
| | 1.00 | Plantacare ® 2000 | Decyl Glucoside |
| | 0.30 | Keltrol ® T | Xanthan Gum |
| | 57.00 | Water demin. | Aqua dem. |
| B | 5.00 | T-Lite ® SF-S | Titanium Dioxide, Silica |
| | | | Hydrate, Alumina Hydrate, |
| | | | Methicone/Dimethicone |
| | | | Copolymer |
| C | 7.50 | Uvinul ® MC 80 | Ethylhexyl Methoxycinnamate |
| | 2.00 | Uvinul ® A Plus | Diethylamino Hydroxybenzoyl |
| | | | Hexyl Benzoate |
| | 2.00 | Dow Corning ® 345 Fluid | Cyclopentasiloxane, |
| | | | Cyclohexasiloxane |
| | 3.50 | Cremophor ® A 6 | Ceteareth-6, Stearyl Alcohol |
| | 1.50 | Cremophor ® A 25 | Ceteareth-25 |
| | 0.50 | Beeswax 3044 PH | Beeswax |
| | 3.00 | Lanette O | Cetearyl Alcohol |
| | 10.00 | Miglyol ® 812 | Caprylic/Capric Triglyceride |
| D | 1.00 | Vitamin E Acetate | Tocopheryl Acetate |
| | 2.00 | Keratin-binding domain-reactive dye | |
| | | 14_264 | |
| | 0.20 | Bisabolol rac. | Bisabolol |
| A | 3.00 | Glycerin 87% | Glycerin |
| | 0.20 | Edeta BD | Disodium EDTA |
| | 0.30 | Abiol | Imidazolidinyl Urea |
| | 1.00 | Plantacare 2000 | Decyl Glucoside |
| | 0.30 | Keltrol ® T | Xanthan Gum |
| | 58.00 | Water demin. | Aqua dem. |
| B | 5.00 | Z-COTE ® MAX | Zinc Oxide, Diphenyl Capryl |
| | | | Methicone |
| C | 7.50 | Uvinul ® MC 80 | Ethylhexyl Methoxycinnamate |
| | 2.00 | Uvinul ® A Plus | Diethylamino Hydroxybenzoyl |
| | | | Hexyl Benzoate |
| | 2.00 | Dow Corning ® 345 Fluid | Cyclopentasiloxane, |
| | | | Cyclohexasiloxane |
| | 3.50 | Cremophor ® A 6 | Ceteareth-6, Stearyl Alcohol |
| | 1.50 | Cremophor ® A 25 | Ceteareth-25 |
| | 0.50 | Beeswax 3044 PH | Beeswax |
| | 3.00 | Lanette O | Cetearyl Alcohol |
| | 10.00 | Miglyol ® 812 | Caprylic/Capric Triglyceride |
| D | 1.00 | Vitamin E Acetate | Tocopheryl Acetate |
| | 1.00 | Keratin-binding domain-reactive dye | |
| | | 14_264 | |
| | 0.20 | Bisabolol rac. | Bisabolol |
| A | 3.00 | Glycerin 87% | Glycerin |
| | 0.20 | Edeta BD | Disodium EDTA |
| | 0.30 | Abiol | Imidazolidinyl Urea |
| | 1.00 | Plantacare ® 2000 | Decyl Glucoside |
| | 0.30 | Keltrol ® T | Xanthan Gum |
| | 58.50 | Water demin. | Aqua dem. |
| B | 5.00 | T-Lite ® SF-S | Titanium Dioxide, Silica |
| | | | Hydrate, Alumina Hydrate, |
| | | | Methicone/Dimethicone |
| | | | Copolymer |
| C | 7.50 | Uvinul ® MC 80 | Ethylhexyl Methoxycinnamate |
| | 5.00 | Uvinul ® N 539 T | Octocrylene |
| | 2.00 | Parsol ® 1789 | Butyl |
| | | | Methoxydibenzoylmethane |
| | 2.00 | Dow Corning ® 345 Fluid | Cyclopentasiloxane, |
| | | | Cyclohexasiloxane |
| | 3.50 | Cremophor ® A 6 | Ceteareth-6, Stearyl Alcohol |
| | 1.50 | Cremophor ® A 25 | Ceteareth-25 |
| | 0.50 | Beeswax 3044 PH | Beeswax |
| | 3.00 | Lanette O | Cetearyl Alcohol |
| | 10.00 | Miglyol ® 812 | Caprylic/Capric Triglyceride |
| D | 1.00 | Vitamin E Acetate | Tocopheryl Acetate |
| | 0.50 | Keratin-binding domain-reactive dye | |
| | | 14_264 | |
| | 0.20 | Bisabolol rac. | Bisabolol |
| A | 3.00 | Glycerin 87% | Glycerin |
| | 0.20 | Edeta BD | Disodium EDTA |
| | 0.30 | Abiol | Imidazolidinyl Urea |
| | 1.00 | Plantacare 2000 | Decyl Glucoside |
| | 0.30 | Keltrol ® T | Xanthan Gum |
| | 2.00 | Mexoryl ® SL | Terephthalidene Dicamphor |
| | | | Sulfonic Acid |
| | 58.40 | Water demin. | Aqua dem. |
| B | 6.00 | T-Lite ® SF-S | Titanium Dioxide, Silica |
| | | | Hydrate, Alumina Hydrate, |
| | | | Methicone/Dimethicone |
| | | | Copolymer |
| | 6.00 | Uvinul ® N 539 T | Octocrylene |
| | 2.00 | Parsol ® 1789 | Butyl |
| | | | Methoxydibenzoylmethane |
| | 2.00 | Dow Corning ® 345 Fluid | Cyclopentasiloxane, |
| | | | Cyclohexasiloxane |
| | 3.50 | Cremophor ® A 6 | Ceteareth-6, Stearyl Alcohol |
| | 1.50 | Cremophor ® A 25 | Ceteareth-25 |
| | 0.50 | Beeswax 3044 PH | Beeswax |
| | 3.00 | Lanette O | Cetearyl Alcohol |
| | 10.00 | Miglyol 812 | Caprylic/Capric Triglyceride |
| D | 1.00 | Vitamin E Acetate | Tocopheryl Acetate |
| | 0.10 | Keratin-binding domain-reactive dye | |
| | | 14_264 | |
| | 0.20 | Bisabolol rac. | Bisabolol |
| A | 3.00 | Glycerin 87% | Glycerin |
| | 0.20 | Edeta BD | Disodium EDTA |
| | 0.30 | Abiol | Imidazolidinyl Urea |
| | 1.00 | Plantacare ® 2000 | Decyl Glucoside |
| | 0.30 | Keltrol ® T | Xanthan Gum |
| | 2.00 | Mexoryl ® SL | Terephthalidene Dicamphor |
| | | | Sulfonic Acid |
| | 58.45 | Water demin. | Aqua dem. |
| B | 6.00 | Z-COTE ® MAX | Zinc Oxide, Diphenyl Capryl |
| | | | Methicone |
| | 6.00 | Uvinul ® N 539 T | Octocrylene |
| | 2.00 | Parsol ® 1789 | Butyl |
| | | | Methoxydibenzoylmethane |
| | 2.00 | Dow Corning ® 345 Fluid | Cyclopentasiloxane, |
| | | | Cyclohexasiloxane |
| | 3.50 | Cremophor ® A 6 | Ceteareth-6, Stearyl Alcohol |
| | 1.50 | Cremophor ® A 25 | Ceteareth-25 |
| | 0.50 | Beeswax 3044 PH | Beeswax |
| | 3.00 | Lanette O | Cetearyl Alcohol |
| | 10.00 | Miglyol 812 | Caprylic/Capric Triglyceride |
| D | 1.00 | Vitamin E Acetate | Tocopheryl Acetate |
| | 0.05 | Keratin-binding domain-reactive dye | |
| | | 14_264 | |
| | 0.20 | Bisabolol rac. | Bisabolol |
| A | 3.00 | Glycerin 87% | Glycerin |
| | 0.20 | Edeta BD | Disodium EDTA |
| | 0.30 | Abiol | Imidazolidinyl Urea |
| | 1.00 | Plantacare ® 2000 | Decyl Glucoside |
| | 0.30 | Keltrol ® T | Xanthan Gum |
| | 2.00 | Neo Heliopan ® AP | Disodium Phenyl |
| | | | Dibenzimidazole Tetrasulfonate |
| | 57.50 | Water demin. | Aqua dem. |
| B | 6.00 | Z-COTE ® MAX | Zinc Oxide, Diphenyl Capryl |
| | | | Methicone |
| | 6.00 | Uvinul ® N 539 T | Octocrylene |
| | 2.00 | Parsol ® 1789 | Butyl |
| | | | Methoxydibenzoylmethane |
| | 2.00 | Dow Corning ® 345 Fluid | Cyclopentasiloxane, |
| | | | Cyclohexasiloxane |
| | 3.50 | Cremophor ® A 6 | Ceteareth-6, Stearyl Alcohol |
| | 1.50 | Cremophor ® A 25 | Ceteareth-25 |
| | 0.50 | Beeswax 3044 PH | Beeswax |
| | 3.00 | Lanette O | Cetearyl Alcohol |
| | 10.00 | Miglyol 812 | Caprylic/Capric Triglyceride |
| D | 1.00 | Vitamin E Acetate | Tocopheryl Acetate |
| | 1.00 | Keratin-binding domain-reactive dye | |
| | | 14_264 | |
| | 0.20 | Bisabolol rac. | Bisabolol |
| A | 25.00 | Dow Corning ® 345 Fluid | Cyclopentasiloxane, |
| | | | Cyclohexasiloxane |
| | 20.00 | Dow Corning ® 245 Fluid | Cyclopentasiloxane |
| | 8.00 | Uvinul ® MC 80 | Ethylhexyl Methoxycinnamate |
| | 4.00 | Abil ® EM 90 | Cetyl PEG/PPG-10/1 |
| | | | Dimethicone |
| | 7.00 | T-Lite ® SF | Titanium Dioxide, Alumina |
| | | | Hydrate, |
| | | | Dimethicone/Methicone |
| | | | Copolymer |
| B | 17.00 | Ethanol 95% | Alcohol |
| | 10.00 | Z-COTE ® MAX | Zinc Oxide, Diphenyl Capryl |
| | | | Methicone |
| | 4.50 | Water demin. | Aqua dem. |
| | 3.00 | Glycerin 87% | Glycerin |
| | 0.50 | Keratin-binding domain-reactive dye | |
| | | 14_264 | |
| | 1.00 | Talc | Talc |
| A | 25.00 | Dow Corning ® 345 Fluid | Cyclopentasiloxane, |
| | | | Cyclohexasiloxane |
| | 20.00 | Dow Corning ® 245 Fluid | Cyclopentasiloxane |
| | 8.00 | Uvinul ® MC 80 | Ethylhexyl Methoxycinnamate |
| | 4.00 | Abil ® EM 90 | Cetyl PEG/PPG-10/1 |
| | | | Dimethicone |
| | 7.00 | T-Lite ® SF-S | Titanium Dioxide, Silica |
| | | | Hydrate, Alumina Hydrate, |
| | | | Methicone/Dimethicone |
| | | | Copolymer |
| B | 17.00 | Ethanol 95% | Alcohol |
| | 9.99 | Z-COTE ® MAX | Zinc Oxide, Diphenyl Capryl |
| | | | Methicone |
| | 5.00 | Water demin. | Aqua dem. |
| | 3.00 | Glycerin 87% | Glycerin |
| | 0.01 | Keratin-binding domain-reactive dye | |
| | | 14_264 | |
| | 1.00 | Talc | Talc |
| A | 20.00 | Dow Corning ® 345 Fluid | Cyclopentasiloxane, |
| | | | Cyclohexasiloxane |
| | 10.00 | Dow Corning ® 245 Fluid | Cyclopentasiloxane |
| | 7.50 | Uvinul ® MC 80 | Ethylhexyl Methoxycinnamate |
| | 2.00 | Uvinul ® T 150 | Ethylhexyl Triazone |
| | 12.00 | Cosmacol ® EMI | Di-C12-13 Alkyl Malate |
| | 4.00 | Abil ® EM 90 | Cetyl PEG/PPG-10/1 |
| | | | Dimethicone |
| B | 7.00 | T-Lite ® SF | Titanium Dioxide, Alumina |
| | | | Hydrate, |
| | | | Dimethicone/Methicone |
| | | | Copolymer |
| C | 15.00 | Ethanol 95% | Alcohol |
| | 10.00 | Z-COTE ® MAX | Zinc Oxide, Diphenyl Capryl |
| | | | Methicone |
| | 3.00 | Glycerin 87% | Glycerin |
| | 1.50 | Keratin-binding domain-reactive dye | |
| | | 14_264 | |
| | 8.00 | Water demin. | Aqua dem. |
| A | 20.00 | Dow Corning ® 345 Fluid | Cyclopentasiloxane, |
| | | | Cyclohexasiloxane |
| | 10.00 | Dow Corning ® 245 Fluid | Cyclopentasiloxane |
| | 7.50 | Uvinul ® MC 80 | Ethylhexyl Methoxycinnamate |
| | 2.00 | Tinosorb ® S | Bis-Ethylhexyloxyphenol |
| | | | Methoxyphenyl Triazine |
| | 12.00 | Cosmacol ® EMI | Di-C12-13 Alkyl Malate |
| | 4.00 | Abil ® EM 90 | Cetyl PEG/PPG-10/1 |
| | | | Dimethicone |
| B | 7.00 | T-Lite ® SF | Titanium Dioxide, Alumina |
| | | | Hydrate, |
| | | | Dimethicone/Methicone |
| | | | Copolymer |
| C | 15.00 | Ethanol 95% | Alcohol |
| | 10.00 | Z-COTE ® MAX | Zinc Oxide, Diphenyl Capryl |
| | | | Methicone |
| | 3.00 | Glycerin 87% | Glycerin |
| | 0.50 | Keratin-binding domain-reactive dye | |
| | | 14_264 | |
| | 9.00 | Water demin. | Aqua dem. |
| A | 2.00 | Cremophor ® WO 7 | PEG-7 Hydrogenated Castor Oil |
| | 6.00 | Abil ® B 8839 | Cyclopentasiloxane, |
| | | | Cyclohexasiloxane |
| | 3.00 | T-Lite ® SF | Titanium Dioxide, Alumina |
| | | | Hydrate, |
| | | | Dimethicone/Methicone |
| | | | Copolymer |
| | 4.00 | Isopropyl Palmitate | Isopropyl Palmitate |
| | 1.00 | Abil ® 350 | Dimethicone |
| B | 7.00 | Uvinul ® MC 80 | Ethylhexyl Methoxycinnamate |
| | 1.00 | Uvinul ® T 150 | Ethylhexyl Triazone |
| | 7.00 | Finsolv ® TN | C12-15 Alkyl Benzoate |
| | 4.00 | Abil ® WE 09 | Polyglyceryl-4 Isostearate, Cetyl |
| | | | PEG/PPG-10/1 Dimethicone, |
| | | | Hexyl Laurate |
| C | 0.50 | Sodium chloride | Sodium Chloride |
| | 0.20 | Edeta BD | Disodium EDTA |
| | 61.30 | Water demin. | Aqua dem. |
| D | 1.00 | Vitamin E Acetate | Tocopheryl Acetate |
| | 1.00 | Keratin-binding domain-reactive dye | |
| | | 14_264 | |
| | q.s. | Preservative | |
| A | 2.00 | Cremophor ® WO 7 | PEG-7 Hydrogenated Castor Oil |
| | 6.00 | Abil ® B 8839 | Cyclopentasiloxane, |
| | | | Cyclohexasiloxane |
| | 3.00 | Z-COTE ® MAX | Zinc Oxide, Diphenyl Capryl |
| | | | Methicone |
| | 4.00 | Isopropyl Palmitate | Isopropyl Palmitate |
| | 1.00 | Abil ® 350 | Dimethicone |
| B | 7.00 | Uvinul ® MC 80 | Ethylhexyl Methoxycinnamate |
| | 1.00 | Uvinul ® T 150 | Ethylhexyl Triazone |
| | 7.00 | Finsolv ® TN | C12-15 Alkyl Benzoate |
| | 4.00 | Abil ® WE 09 | Polyglyceryl-4 Isostearate, Cetyl |
| | | | PEG/PPG-10/1 Dimethicone, |
| | | | Hexyl Laurate |
| C | 0.50 | Sodium chloride | Sodium Chloride |
| | 0.20 | Edeta BD | Disodium EDTA |
| | 62.20 | Water demin. | Aqua dem. |
| D | 1.00 | Vitamin E Acetate | Tocopheryl Acetate |
| | 0.10 | Keratin-binding domain-reactive dye | |
| | | 14_264 | |
| | q.s. | Preservative | |
| A | 2.00 | Cremophor ® WO 7 | PEG-7 Hydrogenated Castor Oil |
| | 6.00 | Abil ® B 8839 | Cyclopentasiloxane, |
| | | | Cyclohexasiloxane |
| | 3.00 | Z-COTE ® MAX | Zinc Oxide, Diphenyl Capryl |
| | | | Methicone |
| | 4.00 | Isopropyl Palmitate | Isopropyl Palmitate |
| | 1.00 | Abil ® 350 | Dimethicone |
| B | 7.00 | Uvinul ® MC 80 | Ethylhexyl Methoxycinnamate |
| | 1.00 | Tinosorb ® S | Bis-Ethylhexyloxyphenol |
| | | | Methoxyphenyl Triazine |
| | 7.00 | Finsolv ® TN | C12-15 Alkyl Benzoate |
| | 4.00 | Abil ® WE 09 | Polyglyceryl-4 Isostearate, Cetyl |
| | | | PEG/PPG-10/1 Dimethicone, |
| | | | Hexyl Laurate |
| C | 0.50 | Sodium chloride | Sodium Chloride |
| | 0.20 | Edeta BD | Disodium EDTA |
| | 60.30 | Water demin. | Aqua dem. |
| D | 1.00 | Vitamin E Acetate | Tocopheryl Acetate |
| | 2.00 | Keratin-binding domain-reactive dye | |
| | | 14_264 | |
| | q.s. | Preservative | |
| A | 2.00 | Cremophor ® WO 7 | PEG-7 Hydrogenated Castor Oil |
| | 6.00 | Abil ® B 8839 | Cyclopentasiloxane, |
| | | | Cyclohexasiloxane |
| | 6.00 | Z-COTE ® MAX | Zinc Oxide, Diphenyl Capryl |
| | | | Methicone |
| | 4.00 | Isopropyl Palmitate | Isopropyl Palmitate |
| | 1.00 | Abil ® 350 | Dimethicone |
| B | 4.00 | Uvinul ® N 539 T | Octocrylene |
| | 1.00 | Tinosorb ® S | Bis-Ethylhexyloxyphenol |
| | | | Methoxyphenyl Triazine |
| | 7.00 | Finsolv ® TN | C12-15 Alkyl Benzoate |
| | 4.00 | Abil ® WE 09 | Polyglyceryl-4 Isostearate, Cetyl |
| | | | PEG/PPG-10/1 Dimethicone, |
| | | | Hexyl Laurate |
| C | 0.50 | Sodium chloride | Sodium Chloride |
| | 0.20 | Edeta BD | Disodium EDTA |
| | 62.10 | Water demin. | Aqua dem |
| D | 1.00 | Vitamin E Acetate | Tocopheryl Acetate |
| | 0.20 | Keratin-binding domain-reactive dye | |
| | | 14_264 | |
| | q.s. | Preservative | |
| A | 2.00 | Cremophor ® WO 7 | PEG-7 Hydrogenated Castor Oil |
| | 6.00 | Abil ® B 8839 | Cyclopentasiloxane, |
| | | | Cyclohexasiloxane |
| | 6.00 | Z-COTE ® MAX | Zinc Oxide, Diphenyl Capryl |
| | | | Methicone |
| | 4.00 | Isopropyl Palmitate | Isopropyl Palmitate |
| | 1.00 | Abil ® 350 | Dimethicone |
| B | 3.00 | Uvinul ® N 539 T | Octocrylene |
| | 1.00 | Mexoryl ® XL | Drometrizole Trisiloxane |
| | 1.00 | Tinosorb ® S | Bis-Ethylhexyloxyphenol |
| | | | Methoxyphenyl Triazine |
| | 7.00 | Finsolv ® TN | C12-15 Alkyl Benzoate |
| | 4.00 | Abil ® WE 09 | Polyglyceryl-4 Isostearate, Cetyl |
| | | | PEG/PPG-10/1 Dimethicone, |
| | | | Hexyl Laurate |
| C | 0.50 | Sodium chloride | Sodium Chloride |
| | 0.20 | Edeta BD | Disodium EDTA |
| | 1.00 | Keratin-binding domain-reactive dye | |
| | | 14_264 | |
| | 61.30 | Water demin. | Aqua dem. |
| D | 1.00 | Vitamin E Acetate | Tocopheryl Acetate |
| | q.s. | Preservative | |
| A | 2.00 | Cremophor ® WO 7 | PEG-7 Hydrogenated Castor Oil |
| | 6.00 | Abil ® B 8839 | Cyclopentasiloxane, |
| | | | Cyclohexasiloxane |
| | 6.00 | T-Lite ® SF-S | Titanium Dioxide, Silica |
| | | | Hydrate, Alumina Hydrate, |
| | | | Methicone/Dimethicone |
| | | | Copolymer |
| | 4.00 | Isopropyl Palmitate | Isopropyl Palmitate |
| | 1.00 | Abil ® 350 | Dimethicone |
| B | 3.00 | Uvinul ® N 539 T | Octocrylene |
| | 1.00 | Mexoryl ® XL | Drometrizole trisiloxane |
| | 1.00 | Tinosorb ® S | Bis-Ethylhexyloxyphenol |
| | | | Methoxyphenyl Triazine |
| | 7.00 | Finsolv ® TN | C12-15 Alkyl Benzoate |
| | 4.00 | Abil ® WE 09 | Polyglyceryl-4 Isostearate, Cetyl |
| | | | PEG/PPG-10/1 Dimethicone, |
| | | | Hexyl Laurate |
| C | 0.50 | Sodium chloride | Sodium Chloride |
| | 0.20 | Edeta BD | Disodium EDTA |
| | 61.80 | Water demin. | Aqua dem. |
| D | 1.00 | Vitamin E Acetate | Tocopheryl Acetate |
| | 0.5% | Keratin-binding domain-reactive | |
| | | dye 14_264 | |
| | q.s. | Preservative | |
| A | 4.50 | Uvinul ® MC 80 | Ethylhexyl Methoxycinnamate |
| | 3.00 | Uvinul ® N 539 T | Octocrylene |
| | 1.00 | Uvinul ® T 150 | Ethylhexyl Triazone |
| | 2.50 | Cosmacol ® EMI | Di-C12-13 Alkyl Malate |
| B | 0.50 | Vitamin E Acetate | Tocopheryl Acetate |
| | 4.00 | Tego Care ® 450 | Polyglyceryl-3 Methyl Glucose |
| | | | Distearate |
| C | 3.50 | Cetiol ® SN | Cetearyl Isononanoate |
| | 1.00 | Ganex ® V-220 | VP/Eicosene Copolymer |
| | 5.00 | Isohexadecane | Isohexadecane |
| | 2.50 | Cosmacol ® EMI | Di-C12-13 Alkyl Malate |
| | 5.00 | Z-COTE ® MAX | Zinc Oxide, Diphenyl Capryl |
| | | | Methicone |
| D | 44.00 | Water demin. | Aqua dem. |
| | 5.00 | Glycerin 87% | Glycerin |
| | 1.00 | Lanette E | Sodium Cetearyl Sulfate |
| | 15.00 | Luviquat ® Care | Polyquaternium-44 |
| | 1.00 | Keratin-binding domain-reactive dye | |
| | | 14_264 | |
| | 0.50 | Keltrol ® | Xanthan Gum |
| E | 1.00 | Phenonip | Phenoxyethanol, |
| | | | Methylparaben, Ethylparaben, |
| | | | Butylparaben, Propylparaben, |
| | | | Isobutylparaben |
| A | 4.50 | Uvinul ® MC 80 | Ethylhexyl Methoxycinnamate |
| | 3.00 | Uvinul ® N 539 T | Octocrylene |
| | 1.00 | Tinosorb ® S | Bis-Ethoxylhexyloxyphenol |
| | | | Methoxyphenyl Triazine |
| | 2.50 | Cosmacol ® EMI | Di-C12-13 Alkyl Malate |
| B | 0.50 | Vitamin E Acetate | Tocopheryl Acetate |
| | 4.00 | Tego Care ® 450 | Polyglyceryl-3 Methyl Glucose |
| | | | Distearate |
| C | 3.50 | Cetiol ® SN | Cetearyl Isononanoate |
| | 1.00 | Ganex ® V-220 | VP/Eicosene Copolymer |
| | 5.00 | Isohexadecane | Isohexadecane |
| | 2.50 | Cosmacol ® EMI | Di-C12-13 Alkyl Malate |
| | 5.00 | Z-COTE ® MAX | Zinc Oxide, Diphenyl Capryl |
| | | | Methicone |
| D | 44.90 | Water demin. | Aqua dem. |
| | 5.00 | Glycerin 87% | Glycerin |
| | 1.00 | Lanette E | Sodium Cetearyl Sulfate |
| | 15.00 | Luviquat Care | Polyquaternium-44 |
| | 0.10 | Keratin-binding domain-reactive dye | |
| | | 14_264 | |
| | 0.50 | Keltrol ® | Xanthan Gum |
| E | 1.00 | Phenonip | Phenoxyethanol, |
| | | | Methylparaben, Ethylparaben, |
| | | | Butylparaben, Propylparaben, |
| | | | Isobutylparaben |
| A | 1.50 | Mexoryl ® XL | Drometrizole Trisiloxane |
| | 5.00 | Uvinul ® N 539 T | Octocrylene |
| | 1.00 | Tinosorb ® S | Bis-Ethylhexyloxyphenol |
| | | | Methoxyphenyl Triazine |
| | 2.50 | Cosmacol ® EMI | Di-C12-13 Alkyl Malate |
| B | 0.50 | Vitamin E Acetate | Tocopheryl Acetate |
| | 4.00 | Tego Care ® 450 | Polyglyceryl-3 Methyl Glucose |
| | | | Distearate |
| C | 3.50 | Cetiol ® SN | Cetearyl Isononanoate |
| | 1.00 | Ganex ® V-220 | VP/Eicosene Copolymer |
| | 5.00 | Isohexadecane | Isohexadecane |
| | 2.50 | Cosmacol ® EMI | Di-C12-13 Alkyl Malate |
| | 5.00 | Z-COTE ® MAX | Zinc Oxide, Diphenyl Capryl |
| | | | Methicone |
| D | 44.50 | Water demin. | Aqua dem. |
| | 5.00 | Glycerin 87% | Glycerin |
| | 1.00 | Lanette E | Sodium Cetearyl Sulfate |
| | 15.00 | Luviquat ® Care | Polyquaternium-44 |
| | 1.50 | Keratin-binding domain-reactive dye | |
| | | 14_264 | |
| | 0.50 | Keltrol ® | Xanthan Gum |
| E | 1.00 | Phenonip | Phenoxyethanol, |
| | | | Methylparaben, Ethylparaben, |
| | | | Butylparaben, Propylparaben, |
| | | | Isobutylparaben |
| A | 1.50 | Mexoryl ® XL | Drometrizole Trisiloxane |
| | 5.00 | Uvinul ® N 539 T | Octocrylene |
| | 1.00 | Tinosorb ® S | Bis-Ethylhexyloxyphenol |
| | | | Methoxyphenyl Triazine |
| | 2.50 | Cosmacol ® EMI | Di-C12-13 Alkyl Malate |
| B | 0.50 | Vitamin E Acetate | Tocopheryl Acetate |
| | 4.00 | Tego Care ® 450 | Polyglyceryl-3 Methyl Glucose |
| | | | Distearate |
| C | 3.50 | Cetiol ® SN | Cetearyl Isononanoate |
| | 1.00 | Ganex ® V-220 | VP/Eicosene Copolymer |
| | 5.00 | Isohexadecane | Isohexadecane |
| | 2.50 | Cosmacol ® EMI | Di-C12-13 Alkyl Malate |
| | 5.00 | T-Lite ® SF | Titanium Dioxide, Alumina |
| | | | Hydrate, |
| | | | Dimethicone/Methicone |
| | | | Copolymer |
| D | 45.00 | Water demin. | Aqua dem. |
| | 5.00 | Glycerin 87% | Glycerin |
| | 1.00 | Lanette E | Sodium Cetearyl Sulfate |
| | 15.00 | Luviquat ® Care | Polyquaternium-44 |
| | 1.00 | Keratin-binding domain-reactive dye | |
| | | 14_264 | |
| | 0.50 | Keltrol ® | Xanthan Gum |
| E | 1.00 | Phenonip | Phenoxyethanol, |
| | | | Methylparaben, Ethylparaben, |
| | | | Butylparaben, Propylparaben, |
| | | | Isobutylparaben |
| A | 1.00 | Abil ® Care 85 | Bis-PEG/PPG-16/16 PEG/PPG-16/16 |
| | | | Dimethicone, Caprylic/Capric |
| | | | Triglyceride |
| | 3.00 | Cremophor ® CO 40 | PEG-40 Hydrogenated Castor Oil |
| | 0.30 | Cremophor ® WO 7 | PEG-7 Hydrogenated Castor Oil |
| | 5.00 | Uvinul ® MC 80 | Ethylhexyl Methoxycinnamate |
| | 10.00 | Witconol APM | PPG-3 Myristyl Ether |
| | 2.00 | Uvinul ® T 150 | Ethylhexyl Triazone |
| | 1.00 | Dow Corning ® 345 Fluid | Cyclopentasiloxane, Cyclohexasiloxane |
| | 5.00 | Uvinul ® N 539 T | Octocrylene |
| B | 5.00 | Z-COTE ® MAX | Zinc Oxide, Diphenyl Capryl Methicone |
| C | 5.00 | 1,2-Propylene glycol | Propylene Glycol |
| | 0.20 | Keltrol ® | Xanthan Gum |
| | 0.10 | Edeta BD | Disodium EDTA |
| | 2.0% | Keratin-binding domain-reactive dye | |
| | | 14_264 | |
| | 1.50 | Simulgel ® 600 | Acrylamide/Sodium |
| | | | Acryloyldimethyltaurate Copolymer, |
| | | | Isohexadecane, Polysorbate 80 |
| | 58.40 | Water demin. | Aqua dem. |
| D | q.s. | Perfume oil | |
| | 0.50 | Glydant | DMDM Hydantoin |
| A | 2.00 | Abil ® Care 85 | Bis-PEG/PPG-16/16 PEG/PPG-16/16 |
| | | | Dimethicone, Caprylic/Capric |
| | | | Triglyceride |
| | 4.00 | Finsolv ® TN | C12-15 Alkyl Benzoate |
| | 1.50 | Miglyol ® 812 | Caprylic/Capric Triglyceride |
| | 0.50 | Vitamin E Acetate | Tocopheryl Acetate |
| | 7.50 | Uvinul ® MC 80 | Ethylhexyl Methoxycinnamate |
| | 4.00 | Cetiol ® B | Dibutyl Adipate |
| | 3.00 | Luvitol ® EHO | Cetearyl Ethylhexanoate |
| | 1.00 | Cremophor ® CO 40 | PEG-40 Hydrogenated Castor Oil |
| | 1.00 | Paraffin oil, low viscosity | Mineral Oil |
| | 3.00 | Plantacare ® 2000 | Decyl Glucoside |
| | 0.50 | Phenonip | Phenoxyethanol, Methylparaben, |
| | | | Ethylparaben, Butylparaben, |
| | | | Propylparaben, Isobutylparaben |
| | q.s. | Perfume oil | |
| B | 4.00 | Z-COTE ® MAX | Zinc Oxide, Diphenyl Capryl |
| | | | Methicone |
| C | 2.00 | Simulgel ® NS | Hydroxyethyl Acrylate/Sodium |
| | | | Acryloyldimethyl Taurate Copolymer, |
| | | | Squalane, Polysorbate 60 |
| | 0.20 | Keltrol ® | Xanthan Gum |
| | 0.10 | Edeta BD | Disodium EDTA |
| | 1.00 | Keratin-binding domain-reactive | |
| | | dye 14_264 | |
| | 64.20 | Water demin. | Aqua dem. |
| A | 6.00 | Gilugel ® SIL 5 | Cyclomethicone, Aluminium/Magnesium |
| | | | Hydroxide Stearate |
| | 5.00 | Uvinul ® MC 80 | Ethylhexyl Methoxycinnamate |
| | 2.00 | Uvinul ® A Plus | Diethylamino Hydroxybenzoyl Hexyl |
| | | | Benzoate |
| | 1.00 | Uvinul ® T 150 | Ethylhexyl Triazone |
| | 7.00 | Finsolv ® TN | C12-15 Alkyl Benzoate |
| | 4.00 | Abil ® WE 09 | Polyglyceryl-4 Isostearate, Cetyl |
| | | | PEG/PPG-10/1 Dimethicone, Hexyl |
| | | | Laurate |
| | 2.00 | Cosmacol ® EMI | Di-C12-13 Alkyl Malate |
| | 3.00 | Isopropyl palmitate | Isopropyl Palmitate |
| | 5.00 | Abil ® B 8839 | Cyclopentasiloxane, Cyclohexasiloxane |
| | 0.50 | Abil ® 350 | Dimethicone |
| B | 0.50 | Sodium chloride | Sodium Chloride |
| | 0.20 | Edeta BD | Disodium EDTA |
| | 0.20 | Keratin-binding domain-reactive | |
| | | dye 14_264 | |
| | 62.10 | Water demin. | Aqua dem. |
| C | 1.00 | Vitamin E Acetate | Tocopheryl Acetate |
| | 0.50 | Phenonip | Phenoxyethanol, Methylparaben, |
| | | | Ethylparaben, Butylparaben, |
| | | | Propylparaben, Isobutylparaben |
| A | 4.50 | Uvinul ® MC 80 | Ethylhexyl Methoxycinnamate |
| | 2.00 | Tinosorb ® S | Bis-Ethylhexyloxyphenol Methoxyphenyl |
| | | | Triazine |
| | 3.00 | Uvinul ® N 539 T | Octocrylene |
| | 2.50 | Cosmacol ® EMI | Di-C12-13 Alkyl Malate |
| | 0.50 | Vitamin E Acetate | Tocopheryl Acetate |
| | 4.00 | Tego Care ® 450 | Polyglyceryl-3 Methyl Glucose Distearate |
| B | 3.50 | Cetiol ® SN | Cetearyl Isononanoate |
| | 1.00 | Ganex ® V-220 | VP/Eicosene Copolymer |
| | 5.00 | Isohexadecane | Isohexadecane |
| | 2.50 | Cosmacol ® EMI | Di-C12-13 Alkyl Malate |
| | 3.00 | T-Lite ® SF | Titanium Dioxide, Alumina Hydrate, |
| | | | Dimethicone/Methicone Copolymer |
| C | 5.00 | Glycerin 87% | Glycerin |
| | 1.00 | Lanette E | Sodium Cetearyl Sulfate |
| | 0.50 | Keltrol ® | Xanthan Gum |
| | 1.00 | Keratin-binding domain- | |
| | | reactive dye 14_264 | |
| | 59.70 | Water demin. | Aqua dem. |
| D | 1.00 | Phenonip | Phenoxyethanol, Methylparaben, |
| | | | Ethylparaben, Butylparaben, |
| | | | Propylparaben, Isobutylparaben |
| | 0.30 | Bisabolol rac. | Bisabolol |
| A | 2.00 | Abil ® Care 85 | Bis-PEG/PPG-16/16 PEG/PPG-16/16 |
| | | | Dimethicone, Caprylic/Capric |
| | | | Triglyceride |
| | 4.00 | Finsolv ® TN | C12-15 Alkyl Benzoate |
| | 1.50 | Miglyol ® 812 | Caprylic/Capric Triglyceride |
| | 0.50 | Vitamin E Acetate | Tocopheryl Acetate |
| | 7.50 | Uvinul ® MC 80 | Ethylhexyl Methoxycinnamate |
| | 4.00 | Cetiol ® B | Dibutyl Adipate |
| | 1.00 | Luvitol ® EHO | Cetearyl Ethylhexanoate |
| | 1.00 | Cremophor ® CO 40 | PEG-40 Hydrogenated Castor Oil |
| | 1.00 | Paraffin oil, low viscosity | Mineral Oil |
| | 3.00 | Plantacare ® 2000 | Decyl Glucoside |
| | 1.00 | Uvinul ® A Plus | Diethylamino Hydroxybenzoyl Hexyl |
| | | | Benzoate |
| | 0.50 | Phenonip | Phenoxyethanol, Methylparaben, |
| | | | Ethylparaben, Butylparaben, |
| | | | Propylparaben, Isobutylparaben |
| | 2.50 | Uvinul ® T 150 | Ethylhexyl Triazone |
| | q.s. | Perfume oil | |
| B | 4.00 | Z-COTE ® MAX | Zinc Oxide, Diphenyl Capryl |
| | | | Methicone |
| C | 2.00 | Simulgel ® NS | Hydroxyethyl Acrylate/Sodium |
| | | | Acryloyldimethyl Taurate Copolymer, |
| | | | Squalane, Polysorbate 60 |
| | 0.10 | Keltrol ® | Xanthan Gum |
| | 0.10 | Edeta BD | Disodium EDTA |
| | 0.50 | Keratin-binding domain-reactive | |
| | | dye 14_264 | |
| | 59.90 | Water demin. | Aqua dem. |
| A | 4.00 | Eumulgin ® VL 75 | Lauryl Glucoside, Polyglyceryl-2 |
| | | | Dipolyhydroxystearate, Glycerin |
| | 2.00 | Lanette O | Cetearyl Alcohol |
| | 12.00 | Myritol ® 331 | Cocoglycerides |
| | 8.00 | Finsolv ® TN | C12-15 Alkyl Benzoate |
| | 8.00 | Cetiol ® B | Dibutyl Adipate |
| B | 6.00 | T-Lite ® SF | Titanium Dioxide, Alumina Hydrate, |
| | | | Dimethicone/Methicone Copolymer |
| | 5.00 | Z-COTE ® MAX | Zinc Oxide, Diphenyl Capryl Methicone |
| C | 3.00 | Glycerin 87% | Glycerin |
| | 0.10 | Edeta BD | Disodium EDTA |
| | 1.50 | Veegum Ultra | Magnesium Aluminum Silicate |
| | 1.50 | Lanette E | Sodium Cetearyl Sulfate |
| | 2.00 | Keratin-binding domain- | |
| | | reactive dye 14_264 | |
| | 0.30 | Keltrol ® | Xanthan Gum |
| | 45.10 | Water demin. | Aqua dem. |
| D | 1.00 | Phenonip | Phenoxyethanol, Methylparaben, |
| | | | Ethylparaben, Butylparaben, |
| | | | Propylparaben, Isobutylparaben |
| A | 4.00 | Eumulgin ® VL 75 | Lauryl Glucoside, Polyglyceryl-2 |
| | | | Dipolyhydroxystearate, Glycerin |
| | 2.00 | Lanette O | Cetearyl Alcohol |
| | 12.00 | Myritol ® 331 | Cocoglycerides |
| | 8.00 | Finsolv ® TN | C12-15 Alkyl Benzoate |
| | 8.00 | Cetiol ® B | Dibutyl Adipate |
| B | 6.00 | Uvinul ® N | Octocrylene |
| | 5.00 | Z-COTE ® MAX | Zinc Oxide, Diphenyl Capryl Methicone |
| C | 3.00 | Glycerin 87% | Glycerin |
| | 0.10 | Edeta BD | Disodium EDTA |
| | 1.50 | Veegum Ultra | Magnesium Aluminum Silicate |
| | 1.50 | Lanette E | Sodium Cetearyl Sulfate |
| | 0.30 | Carbopol ® Ultrez 10 P | Carbomer |
| | 1.00 | Keratin-binding domain- | |
| | | reactive dye 14_264 | |
| | 46.10 | Water demin. | Aqua dem. |
| D | 1.00 | Phenonip | Phenoxyethanol, Methylparaben, |
| | | | Ethylparaben, Butylparaben, |
| | | | Propylparaben, Isobutylparaben |
| A | 4.00 | Eumulgin ® VL 75 | Lauryl Glucoside, Polyglyceryl-2 |
| | | | Dipolyhydroxystearate, Glycerin |
| | 2.00 | Lanette O | Cetearyl Alcohol |
| | 10.00 | Myritol ® 331 | Cocoglycerides |
| | 8.00 | Finsolv ® TN | C12-15 Alkyl Benzoate |
| | 8.00 | Cetiol ® B | Dibutyl Adipate |
| B | 2.00 | Uvinul ® A PlusUvinul ® A Plus | Diethylamino Hydroxybenzoyl Hexyl |
| | | | Benzoate |
| | 5.00 | Z-COTE ® MAX | Zinc Oxide, Diphenyl Capryl Methicone |
| C | 3.00 | Glycerin 87% | Glycerin |
| | 0.10 | Edeta BD | Disodium EDTA |
| | 1.50 | Veegum Ultra | Magnesium Aluminum Silicate |
| | 1.50 | Lanette E | Sodium Cetearyl Sulfate |
| | 5.00 | Keratin-binding domain- | |
| | | reactive dye 14_264 | |
| | 0.30 | Carbopol ® Ultrez 10 P | Carbomer |
| | 48.60 | Water demin. | Aqua dem. |
| D | 1.00 | Phenonip | Phenoxyethanol, Methylparaben, |
| | | | Ethylparaben, Butylparaben, |
| | | | Propylparaben, Isobutylparaben |
| A | 3.50 | Cremophor ® A 6 | Ceteareth-6, Stearyl Alcohol |
| | 1.50 | Cremophor ® A 25 | Ceteareth-25 |
| | 7.50 | Uvinul ® MC 80 | Ethylhexyl Methoxycinnamate |
| | 2.00 | Uvinul ® A Plus | Diethylamino Hydroxybenzoyl Hexyl |
| | | | Benzoate |
| | 2.00 | Dow Corning ® 345 | Cyclopentasiloxane, Cyclohexasiloxane |
| | | | Fluid |
| | 0.50 | Beeswax 3044 PH | Beeswax |
| | 3.00 | Lanette O | Cetearyl Alcohol |
| | 10.00 | Miglyol 812 | Caprylic/Capric Triglyceride |
| B | 5.00 | T-Lite ® SF-S | Titanium Dioxide, Silica Hydrate, Alumina |
| | | | Hydrate, Methicone/Dimethicone |
| | | | Copolymer |
| C | 3.00 | Glycerin 87% | Glycerin |
| | 0.20 | Edeta BD | Disodium EDTA |
| | 0.30 | Keltrol ® T | Xanthan Gum |
| | 1.00 | Plantacare ® 2000 | Decyl Glucoside |
| | 2.00 | Keratin-binding domain- | |
| | | reactive dye 14_264 | |
| | 57.30 | Water demin. | Aqua dem. |
| D | 1.00 | Vitamin E Acetate | Tocopheryl Acetate |
| | 0.20 | Bisabolol rac. | Bisabolol |
| A | 10.00 | Uvinul ® A Plus B | Ethylhexyl Methoxycinnamate, |
| | | | Diethylamino Hydroxybenzoyl Hexyl |
| | | | Benzoate |
| | 10.00 | Uvinul ® N 539 T | Octocrylene |
| | 4.00 | Eumulgin ® VL 75 | Lauryl Glucoside, Polyglyceryl-2 |
| | | | Dipolyhydroxystearate, Glycerin |
| | 8.00 | Cetiol ® B | Dibutyl Adipate |
| | 8.00 | Finsolv ® TN | C12-15 Alkyl Benzoate |
| | 12.00 | Myritol ® 331 | Cocoglycerides |
| | 1.00 | Lanette E | Sodium Cetearyl Sulfate |
| | 2.00 | Lanette O | Cetearyl Alcohol |
| B | 3.00 | Z-COTE ® MAX | Zinc Oxide, Diphenyl Capryl Methicone |
| C | 35.08 | Water demin. | Aqua dem. |
| | 0.38 | Citric acid | Citric Acid |
| | 2.90 | Glycerin 87% | Glycerin |
| | 0.05 | Edeta BD | Disodium EDTA |
| | 0.20 | Allantoin | Allantoin |
| | 0.30 | Keltrol ® | Xanthan Gum |
| | 0.10 | Keratin-binding domain- | |
| | | reactive dye 14_264 | |
| | 1.50 | Veegum Ultra | Magnesium Aluminum Silicate |
| D | 0.50 | Phenonip | Phenoxyethanol, Methylparaben, |
| | | | Ethylparaben, Butylparaben, |
| | | | Propylparaben, Isobutylparaben |
| | 1.00 | Vitamin E Acetate | Tocopheryl Acetate |
| A | 0.70 | Cremophor ® A 25 | Ceteareth-25 |
| | 1.70 | Cremophor ® A 6 | Ceteareth-6, Stearyl Alcohol |
| | 2.00 | Uvinul ® A Plus | Diethylamino Hydroxybenzoyl Hexyl |
| | | | Benzoate |
| | 3.00 | Uvinul ® N 539 T | Octocrylene |
| | 3.00 | Z-COTE ® MAX | Zinc Oxide, Diphenyl Capryl Methicone |
| | 2.00 | Abil ® B 8843 | PEG-14 Dimethicone |
| | 3.60 | Lanette O | Cetearyl Alcohol |
| | 4.00 | Uvinul ® MC 80 | Ethylhexyl Methoxycinnamate |
| | 2.00 | Cetiol ® B | Dibutyl Adipate |
| B | 4.00 | Glycerin 87% | Glycerin |
| | 0.20 | Edeta BD | Disodium EDTA |
| | 71.00 | Water demin. | Panthenol |
| C | 4.00 | Luvigel EM | Caprylic/Capric Triglyceride, Sodium |
| | | | Acrylates Copolymer |
| D | 1.00 | Vitamin E Acetate | Tocopheryl Acetate |
| | 1.00 | Keratin-binding domain- | |
| | | reactive dye 14_264 | |
| | 0.20 | Bisabolol rac. | Bisabolol |
| | q.s. | Preservative | |
| A | 7.50 | Uvinul ® MC 80 | Ethylhexyl Methoxycinnamate |
| | 5.00 | Uvinul ® N 539 T | Octocrylene |
| | 3.00 | Emulgade ® PL 68/50 | Cetearyl Glucoside, Cetearyl Alcohol |
| | 2.00 | Dracorin ® 100 SE | Glyceryl Stearate, PEG-100 Stearate |
| | 1.00 | Fitoderm | Squalane |
| | 0.50 | Cremophor ® WO 7 | PEG-7 Hydrogenated Castor Oil |
| | 0.50 | Cremophor ® PS 20 | Polysorbate 20 |
| | 2.00 | Dry Flo Pure | Aluminum Starch Octenylsuccinate |
| B | 5.00 | Z-COTE ® MAX | Zinc Oxide, Diphenyl Capryl |
| | | | Methicone |
| | 0.03 | Sicomet ® blue P 77 007 | C.I. 77 007. Ultramarines |
| C | 4.00 | 1,2-Propylene Glycol Care | Propylene Glycol |
| | 2.00 | D-Panthenol 50 P | Panthenol, Propylene Glycol |
| | 0.20 | Keltrol ® | Xanthan Gum |
| | 0.50 | Simulgel ® 600 | Acrylamide/Sodium |
| | | | Acryloyldimethyltaurate Copolymer, |
| | | | Isohexadecane, Polysorbate 80 |
| | 0.50 | Keratin-binding domain-reactive | |
| | | dye 14_264 | |
| | 65.27 | Water demin. | Aqua dem. |
| | q.s. | Preservative | |
| | 0.50 | Vitamin E Acetate | Tocopheryl Acetate |
| A | 6.00 | Giluge ® SIL 5 | Cyclomethicone (and) |
| | | | Aluminium/Magnesium Hydroxide |
| | | | Stearate |
| | 5.00 | Uvinul ® N 539 T | Octocrylene |
| | 2.00 | Mexoryl ® XL | Drometrizole Trisiloxane |
| | 1.00 | Uvinul ® T 150 | Ethylhexyl Triazone |
| | 3.00 | T-Lite ® SF-S | Titanium Dioxide, Silica Hydrate, Alumina |
| | | | Hydrate, Methicone/Dimethicone |
| | | | Copolymer |
| | 5.00 | Finsolv ® TN | C12-15 Alkyl Benzoate |
| | 4.00 | Abil ® WE 09 | Polyglyceryl-4 Isostearate, Cetyl |
| | | | PEG/PPG-10/1 Dimethicone, Hexyl |
| | | | Laurate |
| | 2.00 | Cosmacol ® EMI | Di-C12-13 Alkyl Malate |
| | 3.00 | Isopropyl palmitate | Isopropyl Palmitate |
| | 5.00 | Abil ® B 8839 | Cyclopentasiloxane, Cyclohexasiloxane |
| | 0.50 | Abil ® 350 | Dimethicone |
| B | 0.50 | Sodium chloride | Sodium Chloride |
| | 0.20 | Edeta BD | Disodium EDTA |
| | 1.00 | Keratin-binding domain-reactive | |
| | | dye 14_264 | |
| | 61.30 | Water demin. | Aqua dem. |
| C | 1.00 | Vitamin E Acetate | Tocopheryl Acetate |
| | 0.50 | Phenonip | Phenoxyethanol, Methylparaben, |
| | | | Ethylparaben, Butylparaben, |
| | | | Propylparaben, Isobutylparaben |
| A | 1.00 | Abil ® Care 85 | Bis-PEG/PPG-16/16 PEG/PPG-16/16 |
| | | | Dimethicone, Caprylic/Capric Triglyceride |
| | 3.00 | Cremophor ® CO 40 | PEG-40 Hydrogenated Castor Oil |
| | 0.30 | Cremophor ® WO 7 | PEG-7 Hydrogenated Castor Oil |
| | 5.00 | Uvinul ® N 539 T | Octocrylene |
| | 10.00 | Witconol APM | PPG-3 Myristyl Ether |
| | 2.00 | Uvinul ® T 150 | Ethylhexyl Triazone |
| | 1.00 | Dow Corning ® 345 Fluid | Cyclopentasiloxane, Cyclohexasiloxane |
| | 2.00 | Uvinul ® A Plus | Diethylamino Hydroxybenzoyl Hexyl |
| | | | Benzoate |
| B | 5.00 | Z-COTE ® MAX | Zinc Oxide, Diphenyl Capryl Methicone |
| C | 5.00 | 1,2-Propylene glycol | Propylene Glycol |
| | 0.20 | Keltrol ® | Xanthan Gum |
| | 0.10 | Edeta BD | Disodium EDTA |
| | 1.00 | Keratin-binding domain-reactive | |
| | | dye 14_264 | |
| | 1.50 | Simulgel ® 600 | Acrylamide/Sodium |
| | | | Acryloyldimethyltaurate Copolymer, |
| | | | Isohexadecane, Polysorbate 80 |
| | 59.40 | Water demin. | Aqua dem. |
| D | q.s. | Perfume oil | |
| | 0.50 | Glydant | DMDM Hydantoin |
| A | 7.00 | Uvinul ® A Plus B | Ethylhexyl Methoxycinnamate, |
| | | | Diethylamino Hydroxybenzoyl Hexyl |
| | | | Benzoate |
| | 1.00 | Tinosorb ® S | Bis-Ethylhexyloxyphenol Methoxyphenyl |
| | | | Triazine |
| | 1.00 | Uvinul ® T 150 | Ethylhexyl Triazone |
| | 7.00 | Uvinul ® N 539 T | Octocrylene |
| | 4.00 | Eumulgin ® VL 75 | Lauryl Glucoside, Polyglyceryl-2 |
| | | | Dipolyhydroxystearate, Glycerin |
| | 8.00 | Cetiol ® B | Dibutyl Adipate |
| | 8.00 | Finsolv ® TN | C12-15 Alkyl Benzoate |
| | 12.00 | Myritol ® 331 | Cocoglycerides |
| | 1.00 | Lanette E | Sodium Cetearyl Sulfate |
| | 2.00 | Lanette O | Cetearyl Alcohol |
| B | 5.00 | Z-COTE ® MAX | Zinc Oxide, Diphenyl Capryl Methicone |
| C | 35.35 | Water demin. | Aqua dem. |
| | 3.00 | Glycerin 87% | Glycerin |
| | 0.05 | Edeta BD | Disodium EDTA |
| | 0.20 | Allantoin | Allantoin |
| | 0.30 | Keltrol ® | Xanthan Gum |
| | 0.1% | Keratin-binding domain-reactive | |
| | | dye 14_264 | |
| | 1.50 | Veegum Ultra | Magnesium Aluminum Silicate |
| D | 0.50 | Phenonip | Phenoxyethanol, Methylparaben, |
| | | | Ethylparaben, Butylparaben, |
| | | | Propylparaben, Isobutylparaben |
| | 1.00 | Vitamin E Acetate | Tocopheryl Acetate |
| A | 7.00 | Uvinul ® A Plus B | Ethylhexyl Methoxycinnamate, |
| | | | Diethylamino Hydroxybenzoyl Hexyl |
| | | | Benzoate |
| | 1.00 | Tinosorb ® S | Bis-Ethylhexyloxyphenol Methoxyphenyl |
| | | | Triazine |
| | 1.00 | Uvinul ® T 150 | Ethylhexyl Triazone |
| | 7.00 | Uvinul ® N 539 T | Octocrylene |
| | 4.00 | Eumulgin ® VL 75 | Lauryl Glucoside, Polyglyceryl-2 |
| | | | Dipolyhydroxystearate, Glycerin |
| | 8.00 | Cetiol ® B | Dibutyl Adipate |
| | 8.00 | Finsolv ® TN | C12-15 Alkyl Benzoate |
| | 12.00 | Myritol ® 331 | Cocoglycerides |
| | 1.00 | Lanette E | Sodium Cetearyl Sulfate |
| | 2.00 | Lanette O | Cetearyl Alcohol |
| B | 5.00 | T-Lite ® SF | Titanium Dioxide, Alumina Hydrate, |
| | | | Dimethicone/Methicone Copolymer |
| C | 30.45 | Water demin. | Aqua dem. |
| | 3.00 | Glycerin 87% | Glycerin |
| | 0.05 | Edeta BD | Disodium EDTA |
| | 0.20 | Allantoin | Allantoin |
| | 0.30 | Keltrol ® | Xanthan Gum |
| | 5.00 | Keratin-binding domain- | |
| | | reactive dye 14_264 | |
| | 1.50 | Veegum Ultra | Magnesium Aluminum Silicate |
| D | 0.50 | Phenonip | Phenoxyethanol, Methylparaben, |
| | | | Ethylparaben, Butylparaben, |
| | | | Propylparaben, Isobutylparaben |
| | 1.00 | Vitamin E Acetate | Tocopheryl Acetate |
| | 5.00 | Z-COTE ® MAX | Zinc Oxide, Diphenyl Capryl |
| | | | Methicone |
| | 2.00 | Uvinul ® A Plus | Diethylamino Hydroxybenzoyl |
| | | | Hexyl Benzoate |
| | 2.00 | Mexoryl ® XL | Drometrizole Trisiloxane |
| | 3.00 | Uvinul ® MC 80 | Ethylhexyl Methoxycinnamate |
| | 0.50 | Abil ® 350 | Dimethicone |
| | 2.75 | Carnico wax LT 20 | Copernica Cerifera (Carnauba) |
| | | | Wax. Paraffin |
| | 3.70 | Candelilla wax LT 281 LJ | Euphorbia Cerifera (Candelilla) |
| | | | Wax |
| | 1.80 | Beeswax 3050 PH | Beeswax |
| | 3.20 | TeCero wax 30445 | Microcrystalline Wax |
| | 3.20 | TeCero wax 1030 K | Microcrystalline Wax |
| | 1.34 | Cutina CP | Cetyl Palmitate |
| | 6.40 | Vaseline | Petrolatum |
| | 7.30 | Softisan 100 | Hydrogenated Cocoglycerides |
| | 10.00 | Luvitol ® EHO | Cetearyl Ethylhexanoate |
| | 0.17 | Bisabolol nat. | Bisabolol |
| | 1.84 | Vitamin E Acetate | Tocopheryl Acetate |
| | 1.00 | Keratin-binding domain-reactive dye | |
| | | 14_264 | |
| | 0.42 | D,L-Alpha-Tocopherol | Tocopherol |
| | 40.38 | Castor Oil | Ricinus Communis (Castor) Oil |
| A | 1.00 | Abil ® Care 85 | Bis-PEG/PPG-16/16 PEG/PPG-16/16 |
| | | | Dimethicone, Caprylic/Capric Triglyceride |
| | 3.00 | Cremophor ® CO 40 | PEG-40 Hydrogenated Castor Oil |
| | 0.30 | Cremophor ® WO 7 | PEG-7 Hydrogenated Castor Oil |
| | 2.00 | Mexoryl ® XL | Drometrizole Trisiloxane |
| | 10.00 | Witconol ® APM | PPG-3 Myristyl Ether |
| | 1.00 | Uvinul ® T 150 | Ethylhexyl Triazone |
| | 1.00 | Dow Corning ® 345 Fluid | Cyclopentasiloxane, Cyclohexasiloxane |
| | 5.00 | Uvinul ® N 539 T | Octocrylene |
| B | 3.00 | T-Lite ® SF-S | Titanium Dioxide, Silica Hydrate, Alumina |
| | | | Hydrate, Methicone/Dimethicone |
| | | | Copolymer |
| C | 5.00 | 1,2-Propylen glykol | Propylene Glycol |
| | 1.00 | Mexoryl ® SX | Terephthalidene Dicamphor Sulfonic Acid |
| | 0.20 | Keltrol ® | Xanthan Gum |
| | 0.10 | Edeta BD | Disodium EDTA |
| | 1.00 | Keratin-binding domain-reactive | |
| | | dye 14_264 | |
| | 1.50 | Simulgel ® 600 | Acrylamide/Sodium |
| | | | Acryloyldimethyltaurate Copolymer, |
| | | | Isohexadecane, Polysorbate 80 |
| | 69.50 | Water demin. | Aqua dem. |
| D | q.s. | Perfume oil | |
| | 0.50 | Glydant | DMDM Hydantoin |
| A | 1.00 | Abil ® Care 85 | Bis-PEG/PPG-16/16 PEG/PPG-16/16 |
| | | | Dimethicone, Caprylic/Capric Triglyceride |
| | 3.00 | Cremophor ® CO 40 | PEG-40 Hydrogenated Castor Oil |
| | 0.30 | Cremophor ® WO 7 | PEG-7 Hydrogenated Castor Oil |
| | 2.00 | Parsol ® 1789 | Butyl Methoxydibenzoylmethane |
| | 2.00 | Mexoryl ® XL | Drometrizole Trisiloxane |
| | 10.00 | Witconol ® APM | PPG-3 Myristyl Ether |
| | 1.00 | Uvinul ® T 150 | Ethylhexyl Triazone |
| | 1.00 | Dow Corning ® 345 Fluid | Cyclopentasiloxane, Cyclohexasiloxane |
| | 5.00 | Uvinul ® N 539 T | Octocrylene |
| B | 3.00 | T-Lite ® SF-S | Titanium Dioxide, Silica Hydrate, Alumina |
| | | | Hydrate, Methicone/Dimethicone |
| | | | Copolymer |
| C | 5.00 | 1,2-Propylen glycol | Propylene Glycol |
| | 1.00 | Mexoryl ® SX | Terephthalidene Dicamphor Sulfonic Acid |
| | 0.20 | Keltrol ® | Xanthan Gum |
| | 0.10 | Edeta BD | Disodium EDTA |
| | 0.20 | Keratin-binding domain-reactive | |
| | | dye 14_264 | |
| | 1.50 | Simulgel ® 600 | Acrylamide/Sodium |
| | | | Acryloyldimethyltaurate Copolymer, |
| | | | Isohexadecane, Polysorbate 80 |
| | 68.30 | Water demin. | Aqua dem. |
| D | q.s. | Perfume oil | |
| | 0.50 | Glydant | DMDM Hydantoin |
| A | 0.70 | Cremophor ® A 25 | Ceteareth-25 |
| | 1.70 | Cremophor ® A 6 | Ceteareth-6, Stearyl Alcohol |
| | 2.00 | Parsol ® 1789 | Butyl Methoxydibenzoylmethane |
| | 5.00 | Uvinul ® N 539 T | Octocrylene |
| | 4.00 | Z-COTE ® MAX | Zinc Oxide, Diphenyl Capryl Methicone |
| | 2.00 | Abil ® B 8843 | PEG-14 Dimethicone |
| | 3.60 | Lanette O | Cetearyl Alcohol |
| | 1.00 | Uvinul ® T150 | Ethylhexyl Triazone |
| | 2.00 | Cetiol ® B | Dibutyl Adipate |
| B | 4.00 | Glycerin 87% | Glycerin |
| | 0.20 | Edeta BD | Disodium EDTA |
| | 71.00 | Water demin. | Panthenol |
| C | 4.00 | Luvigel ® EM | Caprylic/Capric Triglyceride, Sodium |
| | | | Acrylates Copolymer |
| | 1.00 | Keratin-binding domain- | |
| | | reactive dye 14_264 | |
| D | 1.00 | Vitamin E Acetate | Tocopheryl Acetate |
| | 0.20 | Bisabolol rac. | Bisabolol |
| | q.s. | Preservative | |
| A | 1.00 | Abil ® Care 85 | Bis-PEG/PPG-16/16 PEG/PPG-16/16 |
| | | | Dimethicone, Caprylic/Capric Triglyceride |
| | 3.00 | Cremophor ® CO 40 | PEG-40 Hydrogenated Castor Oil |
| | 0.30 | Cremophor ® WO 7 | PEG-7 Hydrogenated Castor Oil |
| | 2.00 | Parsol ® 1789 | Butyl Methoxydibenzoylmethane |
| | 2.00 | Mexoryl ® XL | Drometrizole Trisiloxane |
| | 10.00 | Witconol APM | PPG-3 Myristyl Ether |
| | 1.00 | Uvinul ® T 150 | Ethylhexyl Triazone |
| | 1.00 | Dow Corning ® 345 Fluid | Cyclopentasiloxane, Cyclohexasiloxane |
| | 5.00 | Uvinul ® N 539 T | Octocrylene |
| B | 3.00 | Z-COTE ® MAX | Zinc Oxide, Diphenyl Capryl Methicone |
| C | 5.00 | 1,2-Propylene glycol | Propylene Glycol |
| | 1.00 | Mexoryl ® SX | Terephthalidene Dicamphor Sulfonic Acid |
| | 0.20 | Keltrol ® | Xanthan Gum |
| | 0.10 | Edeta BD | Disodium EDTA |
| | 1.50 | Simulgel ® 600 | Acrylamide/Sodium |
| | | | Acryloyldimethyltaurate Copolymer, |
| | | | Isohexadecane, Polysorbate 80 |
| | 0.50 | Keratin-binding domain-reactive | |
| | | dye 14_264 | |
| | 68.00 | Water demin. | Aqua dem. |
| D | q.s. | Perfume oil | |
| | 0.50 | Glydant | DMDM Hydantoin |
| A | 2.00 | Uvinul ® A Plus | Diethylamino Hydroxybenzoyl Hexyl |
| | | | Benzoate |
| | 3.00 | Uvinul ® N 539 T | Octocrylene |
| | 3.00 | Emulgade ® PL 68/50 | Cetearyl Glucoside, Cetearyl Alcohol |
| | 2.00 | Dracorin ® 100 SE | Glyceryl Stearate, PEG-100 Stearate |
| | 1.00 | Fitoderm | Squalane |
| | 0.5 | Cremophor ® WO 7 | PEG-7 Hydrogenated Castor Oil |
| | 0.5 | Cremophor ® PS 20 | Polysorbate 20 |
| | 2.00 | Dry Flo Pure | Aluminum Starch Octenylsuccinate |
| B | 5.00 | Z-COTE ® MAX | Zinc Oxide, Diphenyl Capryl Methicone |
| C | 4.00 | 1,2-Propylene Glycol Care | Propylene Glycol |
| | 0.20 | Keltrol ® | Xanthan Gum |
| | 0.50 | Simulgel ® 600 | Acrylamide/Sodium |
| | | | Acryloyldimethyltaurate Copolymer, |
| | | | Isohexadecane, Polysorbate 80 |
| | 66.30 | Water demin. | Aqua dem. |
| D | q.s. | Preservative | |
| | 0.50 | Vitamin E Acetate | Tocopheryl Acetate |
| | 1.00 | Keratin-binding domain- | |
| | | reactive dye 14_264 | |
| | 1.00 | RetiSTAR ™ | Caprylic/Capric Triglyceride, Sodium |
| | | | Ascorbate, Tocopherol, Retinol |

### Example 65

### Hair Coloring with KBD-B-Dye Couplings

[0623] Firstly, a red reactive dye 14_{—}204 was coupled to KDD-D (SEQ ID No.: 168) according to the method described above (Ex. 19). In order to show that the binding of the KBD-D-dye coupling to hair is mediated by the protein and not by the free dye itself, the same dye was treated in each case only with cysteine but without KBD-D. Then, KBD-D-14_{—}264 and 14_{—}264 were each placed onto 5 mg of hair, which was briefly incubated, and nonbound KBD-D-dye or pure dye was washed off using a 15% strength Tween 20 solution. The result clearly shows that the binding to the hair is mediated by the KBD-D and coloring of the hair has taken place.

[0624] If, on the other hand, it is desired to decolor the hair again, a wash with a SDS fraction of 15%, or a treatment with a keratin-containing solution is suitable.

[0625] Dermocosmetic preparations according to the invention are described below, comprising the keratin-binding effector molecule prepared according to Example 20 (keratin-binding domain according to SEQ ID No.: ID 168 coupled with the dye 14 264). Said keratin-binding effector molecule is referred to in the examples below as keratin-binding domain-reactive dye 14_{—}264. It will be appreciated by the person skilled in the art that all other dyes described in Tables 6 and 7 can be coupled with the KBD according to Example 21 and be used in the preparations given below.

### Example 66

### Shampoo (Base Formulation without Keratin-Binding Domain-Reactive Dye)

| | % | Ingredient (INCI) |
|---|---|---|
| A | 15.00 | Cocamidopropyl Betaine |
| | 10.00 | Disodium Cocoamphodiacetate |
| | 5.00 | Polysorbate 20 |
| | 5.00 | Decyl Glucoside |
| | q.s. | Perfume oil |
| | q.s. | Preservative |
| | 1.25 | Polyquaternium-16 |
| | 2.00 | Laureth-3 |
| | q.s. | Citric Acid |
| | 57.75 | Aqua dem. |
| B | 3.00 | PEG-150 Distearate |

Preparation: Weigh in the components of phase A and dissolve. Adjust the pH to 6-7. Add phase B and heat to about 50° C. Cool to room temperature with stirring.

[0627] The content of keratin-binding domain-reactive dye 14_{—}264 KBD-D (SEQ ID No.: 168) in the examples below refers to 100% keratin-binding domain-reactive dye 14_{—}264. The active ingredient according to the invention can be used either in pure form or as an aqueous solution. In the case of the aqueous solution, the content of water dem. in the respective formulation must be adapted.

### Example 67

### Hair-Coloring Shampoo

### Variant 1

[0628] % Ingredient (INCI)

### A 15.00 Cocamidopropyl Betaine

[0629] 10.00 Disodium Cocoamphodiacetate
[0630] 5.00 Polysorbate 20
[0631] 5.00 Decyl Glucoside
[0632] q.s. Perfume oil
[0633] q.s. Preservative
[0634] 1.25 Polyquaternium-16
[0635] 2.00 Laureth-3
[0636] q.s. Citric Acid
[0637] 1.00 Keratin-binding domain-reactive dye 14_{—}264
[0638] 57.75 Aqua dem.

### B 3.00 PEG-150 Distearate

### Variant 2

[0639] % Ingredient (INCI)

### A 15.00 Cocamidopropyl Betaine

[0640] 10.00 Disodium Cocoamphodiacetate
[0641] 5.00 Polysorbate 20
[0642] 5.00 Decyl Glucoside
[0643] q.s. Perfume oil
[0644] q.s. Preservative
[0645] 1.25 Polyquaternium-16
[0646] 2.00 Laureth-3
[0647] q.s. Citric Acid
[0648] 5.00 Keratin-binding domain-reactive dye 14_{—}264
[0649] 53.75 Aqua dem.

### B 3.00 PEG-150 Distearate

[0650] Preparation: Weigh in the components of phase A and dissolve. Adjust the pH to 6-7. Add phase B and heat to about 40° C. Cool rapidly to room temperature with stirring.

### Example 68

### Color Styling Mousse

| | |
|---|---|
| % | Ingredient (INCI) |

Variant 1

| | | |
|---|---|---|
| A | 2.00 | Cocotrimonium Methosulfate |
| | q.s. | Perfume oil |
| B | 6.70 | Acrylates Copolymer |
| | 0.60 | Aminomethyl Propanol |
| | 0.20 | Ceteareth-25 |
| | 0.20 | Panthenol |
| | 0.20 | Hydroxyethylcellulose |
| | 10.00 | Alcohol |
| | 69.97 | Aqua dem. |
| | 1.0 | Keratin-binding domain-reactive dye 14_264 |
| C | 10.00 | Propane/Butane |

Variant 2

| | | |
|---|---|---|
| A | 2.00 | Cocotrimonium Methosulfate |
| | q.s. | Perfume oil |
| B | 6.70 | Acrylates Copolymer |
| | 0.60 | Aminomethyl Propanol |
| | 0.20 | Ceteareth-25 |
| | 0.20 | Panthenol |
| | 0.20 | Hydroxyethylcellulose |
| | 10.00 | Alcohol |
| | 69.97 | Aqua dem. |
| | 0.5 | Keratin-binding domain-reactive dye 14_264 |
| C | 10.00 | Propane/Butane |

Preparation: Mix the components of phase A. Weigh in phase B and dissolve to give a clear solution, then stir into phase A. Bottle with phase C.

### Example 69

### Color Styling Mousse

| | |
|---|---|
| % | Ingredient (INCI) |

Variant 1

| | | |
|---|---|---|
| A | 2.00 | Cocotrimonium Methosulfate |
| | q.s. | Perfume oil |
| B | 7.00 | Polyquaternium-46 |
| | 2.00 | Polyquaternium-11 |
| | 78.87 | Aqua dem. |
| | 2.0 | Keratin-binding domain-reactive dye 14_264 |
| C | 10.00 | Propane/Butane |

Variant 2

| | | |
|---|---|---|
| A | 2.00 | Cocotrimonium Methosulfate |
| | q.s. | Perfume oil |
| B | 7.00 | Polyquaternium-46 |
| | 2.00 | Polyquaternium-11 |
| | 78.87 | Aqua dem. |
| | 1.0 | Keratin-binding domain-reactive dye 14_264 |
| C | 10.00 | Propane/Butane |

Preparation: Mix the components of phase A. Weigh in phase B and dissolve to give a clear solution, then stir into phase A. Bottle with phase C.

### Example 70

[0653] Two tresses of blond unbleached hair: European natural hair, color 9/0, natural blond (2 g) are treated with 0.5 g of the hair-coloring shampoo Example 67/variant 1 and the hair-coloring shampoo is left on the hair for 15 min. The hair tresses are then washed with water and cleansed using shampoo Example 66 and dried. The hair is completely red in color. Blond hair can no longer be detected. One tress is retained as comparison.

[0654] The second tress is then washed five times with shampoo Example 66 and dried. After the fifth wash, the tress is compared with the retained sample. The tress washed five times is still completely red in color. The two tresses have the same red shade. Visually, no difference in the color depth can be seen.

### Example 71

[0655] Two tresses of white hair: selected, white European natural hair (2 g) are treated with 0.5 g of the hair-coloring shampoo Example 67/variant 1 and the hair-coloring shampoo is left on the hair for 15 min. The hair tresses are then washed with water and cleansed using shampoo Example 66 and dried. The hair is completely red in color. White hair can no longer be detected. One tress is retained as comparison.

[0656] The second tress is then washed five times with shampoo Example 66 and dried. After the fifth wash, the tress is compared with the retained sample. The tress washed five times is still completely red in color. The two tresses have the same red shade. Visually, no difference in the color depth can be seen.

### Example 72

[0657] Two tresses of blond unbleached hair: European natural hair, color 9/0, natural blond (2 g) are treated with 0.5 g of the color styling mousse Example 68/variant 2 and the color styling mousse is left on the hair for 15 min. The hair tresses are then washed with water and cleansed using shampoo Example 66 and dried. The hair is completely red in color. Blond hair can no longer be detected. One tress is retained as comparison.

[0658] The second tress is then washed five times with shampoo Example 66 and dried. After the fifth wash, the tress is compared with the retained sample. The tress washed five times is still completely red in color. The two tresses have the same red shade. Visually, no difference in the color depth can be seen.

### Example 73

[0659] Two tresses of white hair: selected white European natural hair (2 g) are treated with 0.5 g of the color styling mousse Example 68/variant 2 and the color styling mousse is left on the hair for 15 min. The hair tresses are then washed with water and cleansed with shampoo Example 66 and dried. The hair is completely red in color. White hair can no longer be detected. One tress is retained as comparison.

[0660] The second tress is then washed five times with shampoo Example 66 and dried. After the fifth wash, the tress is compared with the retained sample. The tress washed five times is still completely red in color. The two tresses have the same red shade. Visually, no difference in the color depth can be seen.

### Example 74

[0661] Two tresses of blond unbleached hair: European natural hair, color 9/0, natural blond (2 g) are treated with 0.5 g of the color styling mousse Example 69/variant 1 and the color styling mousse is left on the hair for 15 min. The hair tresses are then washed with water and cleansed with shampoo Example 66 and dried. The hair is completely red in color. Blond hair can no longer be detected. One tress is retained as comparison.

[0662] The second tress is then washed five times with shampoo Example 66 and dried. After the fifth wash, the tress is compared with the retained sample. The tress washed five times is still completely red in color. The two tresses have the same red shade. Visually, no difference in the color depth can be seen.

### Example 75

[0663] Two tresses of white hair: selected white European natural hair (2 g) are treated with 0.5 g of the color styling mousse Example 69/variant 1 and the color styling mousse is left on the hair for 15 min. The hair tresses are then washed with water and cleansed with shampoo Example 66 and dried. The hair is completely red in color. White hair can no longer be detected. One tress is retained as comparison.

[0664] The second tress is then washed five times with shampoo Example 66 and dried. After the fifth wash, the tress is compared with the retained sample. The tress washed five times is still completely red in color. The two tresses have the same red shade. Visually, no difference in the color depth can be seen.

### Example 76

### Use of the KBD in an Emulsion for Day Care—O/W Type

| | |
|---|---|
| % | Ingredient (INCI) |

Al 1%:

| | | |
|---|---|---|
| A | 1.7 | Ceteareth-6, Stearyl Alcohol |
| | 0.7 | Ceteareth-25 |
| | 2.0 | PEG-14 Dimethicone |
| | 3.6 | Cetearyl Alcohol |
| | 6.0 | Ethylhexyl Methoxycinnamate |
| | 2.0 | Dibutyl Adipate |
| B | 5.0 | Glycerin |
| | 0.2 | Disodium EDTA |
| | 1.0 | Panthenol |
| | q.s. | Preservative |
| | 69.8 | Aqua dem. |
| C | 4.0 | Caprylic/Capric Triglyceride, Sodium Acrylates Copolymer |
| D | 0.2 | Sodium Ascorbyl Phosphate |
| | 1.0 | Tocopheryl Acetate |
| | 0.2 | Bisabolol |
| | 1.0 | Caprylic/Capric Triglyceride, Sodium Ascorbate, |
| | | Tocopherol. Retinol |
| | 1.0 | Aqueous solution with about 5% keratin-binding |
| | | domain-reactive dye 14_264 |
| E | q.s. | Sodium Hydroxide |

Al 5%:

| | | |
|---|---|---|
| A | 1.7 | Ceteareth-6, Stearyl Alcohol |
| | 0.7 | Ceteareth-25 |
| | 2.0 | PEG-14 Dimethicone |
| | 3.6 | Cetearyl Alcohol |
| | 6.0 | Ethylhexyl Methoxycinnamate |
| | 2.0 | Dibutyl Adipate |
| B | 5.0 | Glycerin |
| | 0.2 | Disodium EDTA |
| | 1.0 | Panthenol |
| | q.s. | Preservative |
| | 65.8 | Aqua dem. |
| C | 4.0 | Caprylic/Capric Triglyceride, Sodium Acrylates Copolymer |
| D | 0.2 | Sodium Ascorbyl Phosphate |
| | 1.0 | Tocopheryl Acetate |
| | 0.2 | Bisabolol |
| | 1.0 | Caprylic/Capric Triglyceride, Sodium Ascorbate, |
| | | Tocopherol, Retinol |
| | 5.0 | Aqueous solution with about 5% keratin-binding |
| | | domain-reactive dye 14_264 |
| E | q.s. | Sodium Hydroxide |

Preparation: Heat phases A and B separately from one another to about 80° C. Stir Phase B into phase A and homogenize. Stir phase C into the combined phases A and B and homogenize again. Cool with stirring to about 40° C., add phase D, adjust the pH to about 6.5 using phase E, homogenize and cool to room temperature with stirring.

[0666] Note: The formulation is prepared without protective gas. Bottling must take place into oxygen-impermeable packagings. e.g. aluminum tubes.

### Example 77

### Use of the KBD in a Protective Day Cream—O/W Type

| | |
|---|---|
| % | Ingredient (INCI) |

Al 1%:

| | | |
|---|---|---|
| A | 1.7 | Ceteareth-6, Stearyl Alcohol |
| | 0.7 | Ceteareth-25 |
| | 2.0 | PEG-14 Dimethicone |
| | 3.6 | Cetearyl Alcohol |
| | 6.0 | Ethylhexyl Methoxycinnamate |
| | 2.0 | Dibutyl Adipate |
| B | 5.0 | Glycerin |
| | 0.2 | Disodium EDTA |
| | 1.0 | Panthenol |
| | q.s. | Preservative |
| | 70.6 | Aqua dem. |
| C | 4.0 | Caprylic/Capric Triglyceride, Sodium Acrylates Copolymer |
| D | 1.0 | Sodium Ascorbyl Phosphate |
| | 1.0 | Tocopheryl Acetate |
| | 0.2 | Bisabolol |
| | 1.0 | Aqueous solution with about 5% keratin-binding |
| | | domain-reactive dye 14_264 |
| E | q.s. | Sodium Hydroxide |

Al 5%:

| | | |
|---|---|---|
| A | 1.7 | Ceteareth-6, Stearyl Alcohol |
| | 0.7 | Ceteareth-25 |
| | 2.0 | PEG-14 Dimethicone |
| | 3.6 | Cetearyl Alcohol |
| | 6.0 | Ethylhexyl Methoxycinnamate |
| | 2.0 | Dibutyl Adipate |
| B | 5.0 | Glycerin |
| | 0.2 | Disodium EDTA |
| | 1.0 | Panthenol |
| | q.s. | Preservative |
| | 66.6 | Aqua dem. |
| C | 4.0 | Caprylic/Capric Triglyceride, Sodium Acrylates Copolymer |
| D | 1.0 | Sodium Ascorbyl Phosphate |
| | 1.0 | Tocopheryl Acetate |
| | 0.2 | Bisabolol |
| | 5.0 | Aqueous solution with about 5% keratin-binding |
| | | domain-reactive dye 14_264 |
| E | q.s. | Sodium Hydroxide |

Preparation: Heat phases A and B separately from one another to about 80° C. Stir phase B into phase A and homogenize. Incorporate phase C into the combined phases A and B and homogenize. Cool with stirring to about 40° C. Add phase D, adjust the pH to about 6.5 using phase E and homogenize. Cool to room temperature with stirring.

### Example 78

### Use of the KBD in a Face-Cleansing Lotion—O/W Type

| | |
|---|---|
| % | Ingredient (INCI) |

Al 1%:

| | | |
|---|---|---|
| A | 10.0 | Cetearyl Ethylhexanoate |
| | 10.0 | Caprylic/Capric Triglyceride |
| | 1.5 | Cyclopentasiloxane, Cyclohexasiloxane |
| | 2.0 | PEG-40 Hydrogenated Castor Oil |
| B | 3.5 | Caprylic/Capric Triglyceride, Sodium Acrylates Copolymer |
| C | 1.0 | Tocopheryl Acetate |
| | 0.2 | Bisabolol |
| | q.s. | Preservative |
| | q.s. | Perfume oil |
| D | 3.0 | Polyquaternium-44 |
| | 0.5 | Cocotrimonium Methosulfate |
| | 0.5 | Ceteareth-25 |
| | 2.0 | Panthenol, Propylene Glycol |
| | 4.0 | Propylene Glycol |
| | 0.1 | Disodium EDTA |
| | 1.0 | Aqueous solution with about 5% keratin-binding |
| | | domain-reactive dye 14_264 |
| | 60.7 | Aqua dem. |

Al 5%:

| | | |
|---|---|---|
| A | 10.0 | Cetearyl Ethylhexanoate |
| | 10.0 | Caprylic/Capric Triglyceride |
| | 1.5 | Cyclopentasiloxane, Cyclohexasiloxane |
| | 2.0 | PEG-40 Hydrogenated Castor Oil |
| B | 3.5 | Caprylic/Capric Triglyceride. Sodium Acrylates Copolymer |
| C | 1.0 | Tocopheryl Acetate |
| | 0.2 | Bisabolol |
| | q.s. | Preservative |
| | q.s. | Perfume oil |
| D | 3.0 | Polyquaternium-44 |
| | 0.5 | Cocotrimonium Methosulfate |
| | 0.5 | Ceteareth-25 |
| | 2.0 | Panthenol, Propylene Glycol |
| | 4.0 | Propylene Glycol |
| | 0.1 | Disodium EDTA |
| | 5.0 | Aqueous solution with about 5% keratin-binding |
| | | domain-reactive dye 14_264 |
| | 56.7 | Aqua dem. |

Preparation: Dissolve phase A. Stir phase B into phase A. Incorporate phase C into the combined phases A and B. Dissolve phase D, stir into the combined phases A, B and C and homogenize. After-stir for 15 min.

### Example 79

### Use of the KBD in a Daily Care Body Spray

| | |
|---|---|
| % | Ingredient (INCI) |

Al 1%:

| | | |
|---|---|---|
| A | 3.0 | Ethylhexyl Methoxycinnamate |
| | 2.0 | Diethylamino Hydroxybenzoyl Hexyl Benzoate |
| | 1.0 | Polyquaternium-44 |
| | 3.0 | Propylene Glycol |
| | 2.0 | Panthenol, Propylene Glycol |
| | 1.0 | Cyclopentasiloxane, Cyclohexasiloxane |
| | 10.0 | Octyldodecanol |
| | 0.5 | PVP |
| | 10.0 | Caprylic/Capric Triglyceride |
| | 3.0 | C12-15 Alkyl Benzoate |
| | 3.0 | Glycerin |
| | 1.0 | Tocopheryl Acetate |
| | 0.3 | Bisabolol |
| | 1.0 | Aqueous solution with about 5% keratin-binding domain- |
| | | reactive dye 14_264 |
| | 59.2 | Alcohol |

Al 5%:

| | | |
|---|---|---|
| A | 3.0 | Ethylhexyl Methoxycinnamate |
| | 2.0 | Diethylamino Hydroxybenzoyl Hexyl Benzoate |
| | 1.0 | Polyquaternium-44 |
| | 3.0 | Propylene Glycol |
| | 2.0 | Panthenol, Propylene Glycol |
| | 1.0 | Cyclopentasiloxane, Cyclohexasiloxane |
| | 10.0 | Octyldodecanol |
| | 0.5 | PVP |
| | 10.0 | Caprylic/Capric Triglyceride |
| | 3.0 | C12-15 Alkyl Benzoate |
| | 3.0 | Glycerin |
| | 1.0 | Tocopheryl Acetate |
| | 0.3 | Bisabolol |
| | 5.0 | Aqueous solution with about 5% keratin-binding domain- |
| | | reactive dye 14_264 |
| | 55.2 | Alcohol |

Preparation: Weigh in the components of phase A and dissolve until clear.

### Example 80

### Use of the KBD in a Skin Care Gel

| | |
|---|---|
| % | Ingredient (INCI) |

Al 1%:

| | | |
|---|---|---|
| A | 3.6 | PEG-40 Hydrogenated Castor Oil |
| | 15.0 | Alcohol |
| | 0.1 | Bisabolol |
| | 0.5 | Tocopheryl Acetate |
| | q.s. | Perfume oil |
| B | 3.0 | Panthenol |
| | 0.6 | Carbomer |
| | 1.0 | Aqueous solution with about 5% keratin-binding domain- |
| | | reactive dye 14_264 |
| | 75.4 | Aqua dem. |
| C | 0.8 | Triethanolamine |

Al 5%:

| | | |
|---|---|---|
| A | 3.6 | PEG-40 Hydrogenated Castor Oil |
| | 15.0 | Alcohol |
| | 0.1 | Bisabolol |
| | 0.5 | Tocopheryl Acetate |
| | q.s. | Perfume oil |
| B | 3.0 | Panthenol |
| | 0.6 | Carbomer |
| | 5.0 | Aqueous solution with about 5% keratin-binding domain- |
| | | reactive dye 14_264 |
| | 71.4 | Aqua dem. |
| C | 0.8 | Triethanolamine |

Preparation: Dissolve phase A until clear. Allow phase B to swell and neutralize with phase C. Stir phase A into the homogenized phase B and homogenize.

### Example 81

### Use of the KBD in an After Shave Lotion

| | |
|---|---|
| % | Ingredient (INCI) |

Al 1%:

| | | |
|---|---|---|
| A | 10.0 | Cetearyl Ethylhexanoate |
| | 5.0 | Tocopheryl Acetate |
| | 1.0 | Bisabolol |
| | 0.1 | Perfume oil |
| | 0.3 | Acrylates/C10-30 Alkyl Acrylate Crosspolymer |
| B | 15.0 | Alcohol |
| | 1.0 | Panthenol |
| | 3.0 | Glycerin |
| | 1.0 | Aqueous solution with about 5% keratin-binding domain- |
| | | reactive dye 14_264 |
| | 0.1 | Triethanolamine |
| | 63.5 | Aqua dem. |

Al 5%:

| | | |
|---|---|---|
| A | 10.0 | Cetearyl Ethylhexanoate |
| | 5.0 | Tocopheryl Acetate |
| | 1.0 | Bisabolol |
| | 0.1 | Perfume oil |
| | 0.3 | Acrylates/C10-30 Alkyl Acrylate Crosspolymer |
| B | 15.0 | Alcohol |
| | 1.0 | Panthenol |
| | 3.0 | Glycerin |
| | 5.0 | Aqueous solution with about 5% keratin-binding domain- |
| | | reactive dye 14_264 |
| | 0.1 | Triethanolamine |
| | 59.5 | Aqua dem. |

Preparation: Mix the components of phase A. Dissolve phase B, incorporate into phase A and homogenize.

### Example 82

### Use of the KBD in an Aftersun Lotion

| | |
|---|---|
| % | Ingredient (INCI) |

Al 1%:

| | | |
|---|---|---|
| A | 0.4 | Acrylates/C10-30 Alkyl Acrylate Crosspolymer |
| | 15.0 | Cetearyl Ethylhexanoate |
| | 0.2 | Bisabolol |
| | 1.0 | Tocopheryl Acetate |
| | q.s. | Perfume oil |
| B | 1.0 | Panthenol |
| | 15.0 | Alcohol |
| | 3.0 | Glycerin |
| | 1.0 | Aqueous solution with about 5% keratin-binding domain- |
| | | reactive dye 14_264 |
| | 63.2 | Aqua dem. |
| C | 0.2 | Triethanolamine |

Al 5%:

| | | |
|---|---|---|
| A | 0.4 | Acrylates/C10-30 Alkyl Acrylate Crosspolymer |
| | 15.0 | Cetearyl Ethylhexanoate |
| | 0.2 | Bisabolol |
| | 1.0 | Tocopheryl Acetate |
| | q.s. | Perfume oil |
| B | 1.0 | Panthenol |
| | 15.0 | Alcohol |
| | 3.0 | Glycerin |
| | 5.0 | Aqueous solution with about 5% keratin-binding domain- |
| | | reactive dye 14_264 |
| | 59.2 | Aqua dem. |
| C | 0.2 | Triethanolamine |

Preparation: Mix the components of phase A. Stir phase B into phase A with homogenization. Neutralize with phase C and homogenize again.

### Example 83

### Use of the KBD in a Sunscreen Lotion

| | |
|---|---|
| % | Ingredient (INCI) |

Al 1%:

| | | |
|---|---|---|
| A | 4.5 | Ethylhexyl Methoxycinnamate |
| | 3.0 | Octocrylene |
| | 2.5 | Di-C12-13 Alkyl Malate |
| | 0.5 | Tocopheryl Acetate |
| | 4.0 | Polyglyceryl-3 Methyl Glucose Distearate |
| B | 3.5 | Cetearyl Isononanoate |
| | 1.0 | VP/Eicosene Copolymer |
| | 5.0 | Isohexadecane |
| | 2.5 | Di-C12-13 Alkyl Malate |
| | 3.0 | Titanium Dioxide, Trimethoxycaprylylsilane |
| C | 5.0 | Glycerin |
| | 1.0 | Sodium Cetearyl Sulfate |
| | 0.5 | Xanthan Gum |
| | 61.7 | Aqua dem. |
| D | 1.0 | Aqueous solution with about 5% keratin-binding domain- |
| | | reactive dye 14_264 |
| | 1.0 | Phenoxyethanol, Methylparaben, Ethylparaben, |
| | | Butylparaben, Propyl-paraben Isobutylparaben |
| | 0.3 | Bisabolol |

Al 5%:

| | | |
|---|---|---|
| A | 4.5 | Ethylhexyl Methoxycinnamate |
| | 3.0 | Octocrylene |
| | 2.5 | Di-C12-13 Alkyl Malate |
| | 0.5 | Tocopheryl Acetate |
| | 4.0 | Polyglyceryl-3 Methyl Glucose Distearate |
| B | 3.5 | Cetearyl Isononanoate |
| | 1.0 | VP/Eicosene Copolymer |
| | 5.0 | Isohexadecane |
| | 2.5 | Di-C12-13 Alkyl Malate |
| | 3.0 | Titanium Dioxide, Trimethoxycaprylylsilane |
| C | 5.0 | Glycerin |
| | 1.0 | Sodium Cetearyl Sulfate |
| | 0.5 | Xanthan Gum |
| | 57.7 | Aqua dem. |
| D | 5.0 | Aqueous solution with about 5% keratin-binding domain- |
| | | reactive dye 14_264 |
| | 1.0 | Phenoxyethanol, Methylparaben, Ethylparaben, |
| | | Butylparaben, Propyl-paraben, Isobutylparaben |
| | 0.3 | Bisabolol |

Preparation: Heat the components of phases A and B separately from one another to about 80° C.. Stir phase B into phase A and homogenize. Heat phase C to about 80° C. and stir into the combined phases A and B with homogenization. Cool to about 40° C. with stirring, add phase D and homogenize again.

### Example 84

### Use of the KBD in a Sunscreen Lotion—O/W Type

| | |
|---|---|
| % | Ingredient (INCI) |

Al 1%:

| | | |
|---|---|---|
| A | 2.0 | Ceteareth-6, Stearyl Alcohol |
| | 2.0 | Ceteareth-25 |
| | 3.0 | Tribehenin |
| | 2.0 | Cetearyl Alcohol |
| | 2.0 | Cetearyl Ethylhexanoate |
| | 5.0 | Ethylhexyl Methoxycinnamate |
| | 1.0 | Ethylhexyl Triazone |
| | 1.0 | VP/Eicosene Copolymer |
| | 7.0 | Isopropyl Myristate |
| B | 5.0 | Zinc Oxide, Triethoxycaprylylsilane |
| C | 0.2 | Xanthan Gum |
| | 0.5 | Hydroxyethyl Acrylate/Sodium Acryloyldimethyl Taurate |
| | | Copolymer, Squalane, Polysorbate 60 |
| | 0.2 | Disodium EDTA |
| | 5.0 | Propylene Glycol |
| | 0.5 | Panthenol |
| | 60.9 | Aqua dem. |
| D | 1.0 | Aqueous solution with about 5% keratin-binding domain- |
| | | reactive dye 14_264 |
| | 0.5 | Phenoxyethanol, Methylparaben, Butylparaben, Ethylparaben, |
| | | Propyl-paraben, Isopropylparaben |
| | 1.0 | Tocopheryl Acetate |
| | 0.2 | Bisabolol |

Al 5%:

| | | |
|---|---|---|
| A | 2.0 | Ceteareth-6, Stearyl Alcohol |
| | 2.0 | Ceteareth-25 |
| | 3.0 | Tribehenin |
| | 2.0 | Cetearyl Alcohol |
| | 2.0 | Cetearyl Ethylhexanoate |
| | 5.0 | Ethylhexyl Methoxycinnamate |
| | 1.0 | Ethylhexyl Triazone |
| | 1.0 | VP/Eicosene Copolymer |
| | 7.0 | Isopropyl Myristate |
| B | 5.0 | Zinc Oxide, Triethoxycaprylylsilane |
| C | 0.2 | Xanthan Gum |
| | 0.5 | Hydroxyethyl Acrylate/Sodium Acryloyldimethyl Taurate |
| | | Copolymer, Squalane, Polysorbate 60 |
| | 0.2 | Disodium EDTA |
| | 5.0 | Propylene Glycol |
| | 0.5 | Panthenol |
| | 56.9 | Aqua dem. |
| D | 5.0 | Aqueous solution with about 5% keratin-binding domain- |
| | | reactive dye 14_264 |
| | 0.5 | Phenoxyethanol, Methylparaben, Butylparaben, Ethylparaben, |
| | | Propyl-paraben, Isopropylparaben |
| | 1.0 | Tocopheryl Acetate |
| | 0.2 | Bisabolol |

Preparation: Heat phase A to about 80° C., stir in phase B and homogenize for 3 min. Likewise heat phase C to 80° C. and stir into the combined phases A and B with homogenization. Cool to about 40° C.. stir in phase D and homogenize again.

### Example 85

### Use of the KBD in a Sunscreen Lotion—O/W Type

| | |
|---|---|
| % | Ingredient (INCI) |

Al 1%:

| | | |
|---|---|---|
| A | 3.5 | Ceteareth-6, Stearyl Alcohol |
| | 1.5 | Ceteareth-25 |
| | 7.5 | Ethylhexyl Methoxycinnamate |
| | 2.0 | Cyclopentasiloxane, Cyclohexasiloxane |
| | 0.5 | Beeswax |
| | 3.0 | Cetearyl Alcohol |
| | 10.0 | Caprylic/Capric Triglyceride |
| B | 5.0 | Titanium Dioxide, Silica, Methicone, Alumina |
| C | 3.0 | Glycerin |
| | 0.2 | Disodium EDTA |
| | 0.3 | Xanthan Gum |
| | 1.0 | Decyl Glucoside |
| | 2.0 | Panthenol, Propylene Glycol |
| | 56.3 | Aqua dem. |
| D | 1.0 | Aqueous solution with about 5% keratin-binding domain- |
| | | reactive dye 14_264 |
| | 1.0 | Tocopheryl Acetate |
| | 0.2 | Bisabolol |
| | q.s. | Perfume oil |
| | q.s. | Preservative |

Al 5%:

| | | |
|---|---|---|
| A | 3.5 | Ceteareth-6, Stearyl Alcohol |
| | 1.5 | Ceteareth-25 |
| | 7.5 | Ethylhexyl Methoxycinnamate |
| | 2.0 | Cyclopentasiloxane, Cyclohexasiloxane |
| | 0.5 | Beeswax |
| | 3.0 | Cetearyl Alcohol |
| | 10.0 | Caprylic/Capric Triglyceride |
| B | 5.0 | Titanium Dioxide, Silica, Methicone, Alumina |
| C | 3.0 | Glycerin |
| | 0.2 | Disodium EDTA |
| | 0.3 | Xanthan Gum |
| | 1.0 | Decyl Glucoside |
| | 2.0 | Panthenol, Propylene Glycol |
| | 52.3 | Aqua dem. |
| D | 5.0 | Aqueous solution with about 5% keratin-binding domain- |
| | | reactive dye 14_264 |
| | 1.0 | Tocopheryl Acetate |
| | 0.2 | Bisabolol |
| | q.s. | Perfume oil |
| | q.s. | Preservative |

Preparation: Heat phase A to about 80° C., stir in phase B and homogenize for 3 min. Likewise heat phase C to 80° C. and stir into the combined phases A and B with homogenization. Cool to about 40° C., stir in phase D and homogenize again.

### Example 86

### Use of the KBD in a Foot Balsam

| | |
|---|---|
| % | Ingredient (INCI) |

Al 1%:

| | | |
|---|---|---|
| A | 2.0 | Ceteareth-6, Stearyl Alcohol |
| | 2.0 | Ceteareth-25 |
| | 5.0 | Cetearyl Ethylhexanoate |
| | 4.0 | Cetyl Alcohol |
| | 4.0 | Glyceryl Stearate |
| | 5.0 | Mineral Oil |
| | 0.2 | Menthol |
| | 0.5 | Camphor |
| B | 69.3 | Aqua dem. |
| | q.s. | Preservative |
| C | 1.0 | Bisabolol |
| | 1.0 | Tocopheryl Acetate |
| D | 1.0 | Aqueous solution with about 5% keratin-binding domain- |
| | | reactive dye 14_264 |
| | 5.0 | Witch Hazel Extract |

Al 5%:

| | | |
|---|---|---|
| A | 2.0 | Ceteareth-6, Stearyl Alcohol |
| | 2.0 | Ceteareth-25 |
| | 5.0 | Cetearyl Ethylhexanoate |
| | 4.0 | Cetyl Alcohol |
| | 4.0 | Glyceryl Stearate |
| | 5.0 | Mineral Oil |
| | 0.2 | Menthol |
| | 0.5 | Camphor |
| B | 65.3 | Aqua dem. |
| | q.s. | Preservative |
| C | 1.0 | Bisabolol |
| | 1.0 | Tocopheryl Acetate |
| D | 5.0 | Aqueous solution with about 5% keratin-binding domain- |
| | | reactive dye 14_264 |
| | 5.0 | Witch Hazel Extract |

Preparation: Heat the components of phases A and B separately from one another to about 80° C.. Stir phase B into phase A with homogenization. Cool to about 40° C. with stirring, add phases C and D and briefly after-homogenize. Cool to room temperature with stirring.

### Example 87

### Use of the KBD in a W/O Emulsion with Bisabolol

| | |
|---|---|
| % | Ingredient (INCI) |

Al 1%:

| | | |
|---|---|---|
| A | 6.0 | PEG-7 Hydrogenated Castor Oil |
| | 8.0 | Cetearyl Ethylhexanoate |
| | 5.0 | Isopropyl Myristate |
| | 15.0 | Mineral Oil |
| | 0.3 | Magnesium Stearate |
| | 0.3 | Aluminum Stearate |
| | 2.0 | PEG-45/Dodecyl Glycol Copolymer |
| B | 5.0 | Glycerin |
| | 0.7 | Magnesium Sulfate |
| | 55.6 | Aqua dem. |
| C | 1.0 | Aqueous solution with about 5% keratin-binding domain- |
| | | reactive dye 14_264 |
| | 0.5 | Tocopheryl Acetate |
| | 0.6 | Bisabolol |

Al 5%:

| | | |
|---|---|---|
| A | 6.0 | PEG-7 Hydrogenated Castor Oil |
| | 8.0 | Cetearyl Ethylhexanoate |
| | 5.0 | Isopropyl Myristate |
| | 15.0 | Mineral Oil |
| | 0.3 | Magnesium Stearate |
| | 0.3 | Aluminum Stearate |
| | 2.0 | PEG-45/Dodecyl Glycol Copolymer |
| B | 5.0 | Glycerin |
| | 0.7 | Magnesium Sulfate |
| | 51.6 | Aqua dem. |
| C | 5.0 | Aqueous solution with about 5% keratin-binding domain- |
| | | reactive dye 14_264 |
| | 0.5 | Tocopheryl Acetate |
| | 0.6 | Bisabolol |

Preparation: Heat phases A and B separately from one another to about 85° C.. Stir phase B into phase A and homogenize. Cool to about 40° C. with stirring, add phase C and briefly homogenize again. Cool to room temperature with stirring. List of formulations for patent keratin-binding domain - haircare

### Example 88

### Foam Conditioner with Setting Agent

| | |
|---|---|
| % | Ingredient (INCI) |

Al 1%

| | | |
|---|---|---|
| A | 10.0 | PVP/VA Copolymer |
| | 0.2 | Hydroxyethyl Cetyldimonium Phosphate |
| | 0.2 | Ceteareth-25 |
| | 0.5 | Dimethicone Copolyol |
| | q.s. | Perfume oil |
| | 10.0 | Alcohol |
| | 1.0 | Aqueous solution with about 5% keratin-binding |
| | | domain-reactive dye 14_264 |
| | 68.1 | Aqua dem. |
| | 10.0 | Propane/Butane |

Al 5%

| | | |
|---|---|---|
| A | 10.0 | PVP/VA Copolymer |
| | 0.2 | Hydroxyethyl Cetyldimonium Phosphate |
| | 0.2 | Ceteareth-25 |
| | 0.5 | Dimethicone Copolyol |
| | q.s. | Perfume oil |
| | 10.0 | Alcohol |
| | 5.0 | Aqueous solution with about 5% keratin-binding |
| | | domain-reactive dye 14_264 |
| | 64.1 | Aqua dem. |
| B | 10.0 | Propane/Butane |

Preparation: Weigh the components of phase A together, stir until everything has dissolved and bottle with phase B.

### Example 89

### Hair-Coloring Foam Conditioner

| | |
|---|---|
| % | Ingredient (INCI) |

Al 1%

| | | |
|---|---|---|
| A | 1.0 | Polyquaternium-4 |
| | 0.5 | Hydroxyethyl Cetyldimonium Phosphate |
| | 1.0 | Aqueous solution with about 5% keratin-binding |
| | | domain-reactive dye 14_264 |
| | q.s. | Perfume oil |
| | q.s. | Preservative |
| | 91.5 | Aqua dem. |
| B | 6.0 | Propane/Butane |

Al 5%

| | | |
|---|---|---|
| A | 1.0 | Polyquaternium-4 |
| | 0.5 | Hydroxyethyl Cetyldimonium Phosphate |
| | 5.0 | Aqueous solution with about 5% keratin-binding |
| | | domain-reactive dye 14 264 |
| | q.s. | Perfume oil |
| | q.s. | Preservative |
| | 87.5 | Aqua dem. |
| B | 6.0 | Propane/Butane |

Preparation: Weigh the components of phase A together, stir until everything has dissolved to give a clear solution and bottle with phase B.

### Example 90

### Hair-Coloring Foam Conditioner

| | |
|---|---|
| % | Ingredient (INCI) |

Al 1%

| | | |
|---|---|---|
| A | 1.0 | Polyquaternium-11 |
| | 0.5 | Hydroxyethyl Cetyldimonium Phosphate |
| | 1.0 | Aqueous solution with about 5% keratin-binding |
| | | domain-reactive dye 14_264 |
| | q.s. | Perfume oil |
| | q.s. | Preservative |
| | 91.5 | Aqua dem. |
| B | 6.0 | Propane/Butane |

Al 5%

| | | |
|---|---|---|
| A | 1.0 | Polyquaternium-11 |
| | 0.5 | Hydroxyethyl Cetyldimonium Phosphate |
| | 5.0 | Aqueous solution with about 5% keratin-binding |
| | | domain-reactive dye 14_264 |
| | q.s. | Perfume oil |
| | q.s. | Preservative |
| | 87.5 | Aqua dem. |
| B | 6.0 | Propane/Butane |

Preparation: Weigh the components of phase A together, stir until everything has dissolved to give a clear solution and bottle with phase B.

### Example 91

### Hair-Coloring Styling Foam

| | |
|---|---|
| % | Ingredient (INCI) |

Al 1%

| | | |
|---|---|---|
| A | 0.5 | Laureth-4 |
| | q.s. | Perfume oil |
| B | 77.3 | Aqua dem. |
| | 10.0 | Polyquaternium-28 |
| | 1.0 | Aqueous solution with about 5% keratin-binding |
| | | domain-reactive dye 14_264 |
| | 0.5 | Dimethicone Copolyol |
| | 0.2 | Ceteareth-25 |
| | 0.2 | Panthenol |
| | 0.1 | PEG-25 PABA |
| | 0.2 | Hydroxyethylcellulose |
| C | 10.0 | HFC 152 A |

Al 5%

| | | |
|---|---|---|
| A | 0.5 | Laureth-4 |
| | q.s. | Perfume oil |
| B | 73.3 | Aqua dem. |
| | 10.0 | Polyquaternium-28 |
| | 5.0 | Aqueous solution with about 5% keratin-binding |
| | | domain-reactive dye 14_264 |
| | 0.5 | Dimethicone Copolyol |
| | 0.2 | Ceteareth-25 |
| | 0.2 | Panthenol |
| | 0.1 | PEG-25 PABA |
| | 0.2 | Hydroxyethylcellulose |
| C | 10.0 | HFC 152 A |

Preparation: Mix the components of phase A. Add the components of phase B one after the other and dissolve. Bottle with phase C.

### Example 92

### Hair-Coloring Styling Foam

| | |
|---|---|
| % | Ingredient (INCI) |

Al 1%

| | | |
|---|---|---|
| A | 2.0 | Cocotrimonium Methosulfate |
| | q.s. | Perfume oil |
| B | 78.5 | Aqua dem. |
| | 6.7 | Acrylates Copolymer |
| | 0.6 | AMP |
| | 1.0 | Aqueous solution with about 5% keratin-binding |
| | | domain-reactive dye 14_264 |
| | 0.5 | Dimethicone Copolyol |
| | 0.2 | Ceteareth-25 |
| | 0.2 | Panthenol |
| | 0.1 | PEG-25 PABA |
| | 0.2 | Hydroxyethylcellulose |
| C | 10.0 | HFC 152 A |

Al 5%

| | | |
|---|---|---|
| A | 2.0 | Cocotrimonium Methosulfate |
| | q.s. | Perfume oil |
| B | 74.5 | Aqua dem. |
| | 6.7 | Acrylates Copolymer |
| | 0.6 | AMP |
| | 5.0 | Aqueous solution with about 5% keratin-binding |
| | | domain-reactive dye 14_264 |
| | 0.5 | Dimethicone Copolyol |
| | 0.2 | Ceteareth-25 |
| | 0.2 | Panthenol |
| | 0.1 | PEG-25 PABA |
| | 0.2 | Hydroxyethylcellulose |
| C | 10.0 | HFC 152 A |

Preparation: Mix the components of phase A. Add the components of phase B one after the other and dissolve. Bottle with phase C.

### Example 93

### Hair-Coloring Styling Foam

| | |
|---|---|
| % | Ingredient (INCI) |

Al 1%

| | | |
|---|---|---|
| A | 2.0 | Cocotrimonium Methosulfate |
| | q.s. | Perfume oil |
| B | 7.70 | Polyquaternium-44 |
| | 1.0 | Aqueous solution with about 5% keratin-binding |
| | | domain-reactive dye 14_264 |
| | q.s. | Preservative |
| | 79.3 | Aqua dem. |
| C | 10.0 | Propane/Butane |

Al 5%

| | | |
|---|---|---|
| A | 2.0 | Cocotrimonium Methosulfate |
| | q.s. | Perfume oil |
| B | 7.70 | Polyquaternium-44 |
| | 5.0 | Aqueous solution with about 5% keratin-binding |
| | | domain-reactive dye 14_264 |
| | q.s. | Preservative |
| | 75.3 | Aqua dem. |
| C | 10.0 | Propane/Butane |

Preparation: Mix the components of phase A. Dissolve the components of phase B until clear, then stir phase B into phase A. Adjust the pH to 6-7, bottle with phase C.

### Example 94

### Hair-Coloring Styling Foam

| | |
|---|---|
| % | Ingredient (INCI) |

Al 1%

| | | |
|---|---|---|
| A | 2.00 | Cocotrimonium Methosulfate |
| | q.s. | Perfume oil |
| B | 72.32 | Aqua dem. |
| | 2.00 | VP/Acrylates/Lauryl Methacrylate Copolymer |
| | 0.53 | AMP |
| | 1.00 | Aqueous solution with about 5% keratin-binding |
| | | domain-reactive dye 14_264 |
| | 0.20 | Ceteareth-25 |
| | 0.50 | Panthenol |
| | 0.05 | Benzophenone-4 |
| | 0.20 | Amodimethicone, Cetrimonium Chloride, Trideceth-12 |
| | 15.00 | Alcohol |
| C | 0.20 | Hydroxyethylcellulose |
| D | 6.00 | Propane/Butane |

Al 5%

| | | |
|---|---|---|
| A | 2.00 | Cocotrimonium Methosulfate |
| | q.s. | Perfume oil |
| B | 68.32 | Aqua dem. |
| | 2.00 | VP/Acrylates/Lauryl Methacrylate Copolymer |
| | 0.53 | AMP |
| | 5.00 | Aqueous solution with about 5% keratin-binding |
| | | domain-reactive dye 14_264 |
| | 0.20 | Ceteareth-25 |
| | 0.50 | Panthenol |
| | 0.05 | Benzophenone-4 |
| | 0.20 | Amodimethicone, Cetrimonium Chloride, Trideceth-12 |
| | 15.00 | Alcohol |
| C | 0.20 | Hydroxyethylcellulose |
| D | 6.00 | Propane/Butane |

Preparation: Mix the components of phase A. Add the components of phase B one after the other and dissolve. Allow phase C to swell in the mixture of A and B, then adjust the pH to 6-7. Bottle with phase D.

### Example 95

### Hair-Coloring Styling Foam

| | |
|---|---|
| % | Ingredient (INCI) |

Al 1%

| | | |
|---|---|---|
| A | 2.00 | Cetrimonium Chloride |
| | q.s. | Perfume oil |
| B | 67.85 | Aqua dem. |
| | 7.00 | Polyquaternium-46 |
| | 1.00 | Aqueous solution with about 5% keratin-binding |
| | | domain-reactive dye 14_264 |
| | 0.20 | Ceteareth-25 |
| | 0.50 | Panthenol |
| | 0.05 | Benzophenone-4 |
| | 0.20 | Amodimethicone, Cetrimonium Chloride, Trideceth-12 |
| | 15.00 | Alcohol |
| C | 0.20 | Hydroxyethylcellulose |
| D | 6.00 | Propane/Butane |

Al 5%

| | | |
|---|---|---|
| A | 2.00 | Cetrimonium Chloride |
| | q.s. | Perfume oil |
| B | 63.85 | Aqua dem. |
| | 7.00 | Polyquaternium-46 |
| | 5.00 | Aqueous solution with about 5% keratin-binding |
| | | domain-reactive dye 14_264 |
| | 0.20 | Ceteareth-25 |
| | 0.50 | Panthenol |
| | 0.05 | Benzophenone-4 |
| | 0.20 | Amodimethicone, Cetrimonium Chloride, Trideceth-12 |
| | 15.00 | Alcohol |
| C | 0.20 | Hydroxyethylcellulose |
| D | 6.00 | Propane/Butane |

Preparation: Mix the components of phase A. Add the components of phase B one after the other and dissolve. Allow phase C to swell in the mixture of A and B, then adjust the pH to 6-7. Bottle with phase D.

### Example 96

### Hair-Coloring Styling Foam

| | |
|---|---|
| % | Ingredient (INCI) |

Al 1%

| | | |
|---|---|---|
| A | q.s. | PEG-40 Hydrogenated Castor Oil |
| | q.s. | Perfume oil |
| | 85.5 | Aqua dem. |
| B | 7.0 | Sodium Polystyrene Sulfonate |
| | 1.0 | Aqueous solution with about 5% keratin-binding |
| | | domain-reactive dye 14_264 |
| | 0.5 | Cetrimonium Bromide |
| | q.s. | Preservative |
| C | 6.0 | Propane/Butane |

Al 5%

| | | |
|---|---|---|
| A | q.s. | PEG-40 Hydrogenated Castor Oil |
| | q.s. | Perfume oil |
| | 81.5 | Aqua dem. |
| B | 7.0 | Sodium Polystyrene Sulfonate |
| | 5.0 | Aqueous solution with about 5% keratin-binding |
| | | domain-reactive dye 14_264 |
| | 0.5 | Cetrimonium Bromide |
| | q.s. | Preservative |
| C | 6.0 | Propane/Butane |

Preparation: Solubilize phase A. Weigh phase B into phase A and dissolve until clear. Adjust the pH to 6-7, bottle with phase C.

### Example 97

### Hair-Coloring Styling Foam

| | |
|---|---|
| % | Ingredient (INCI) |

Al 1%

| | | |
|---|---|---|
| A | q.s. | PEG-40 Hydrogenated Castor Oil |
| | q.s. | Perfume oil |
| | 92.0 | Aqua dem. |
| B | 0.5 | Polyquaternium-10 |
| | 1.0 | Aqueous solution with about 5% keratin-binding |
| | | domain-reactive dye 14_264 |
| | 0.5 | Cetrimonium Bromide |
| | q.s. | Preservative |
| C | 6.0 | Propane/Butane |

Al 5%

| | | |
|---|---|---|
| A | q.s. | PEG-40 Hydrogenated Castor Oil |
| | q.s. | Perfume oil |
| | 88.0 | Aqua dem. |
| B | 0.5 | Polyquaternium-10 |
| | 5.0 | Aqueous solution with about 5% keratin-binding |
| | | domain-reactive dye 14_264 |
| | 0.5 | Cetrimonium Bromide |
| | q.s. | Preservative |
| C | 6.0 | Propane/Butane |

Preparation: Solubilize phase A. Weigh phase B into phase A and dissolve until clear. Adjust the pH to 6-7, bottle with phase C.

### Example 98

### Hair-Coloring Styling Foam

| | |
|---|---|
| % | Ingredient (INCI) |

Al 1%

| | | |
|---|---|---|
| A | q.s. | PEG-40 Hydrogenated Castor Oil |
| | q.s. | Perfume oil |
| | 82.5 | Aqua dem. |
| B | 10.0 | Polyquaternium-16 |
| | 1.0 | Aqueous solution with about 5% keratin-binding |
| | | domain-reactive dye 14_264 |
| | 0.5 | Hydroxyethyl Cetyldimonium Phosphate |
| | q.s. | Preservative |
| C | 6.0 | Propane/Butane |

Al 5%

| | | |
|---|---|---|
| A | q.s. | PEG-40 Hydrogenated Castor Oil |
| | q.s. | Perfume oil |
| | 78.5 | Aqua dem. |
| B | 10.0 | Polyquaternium-16 |
| | 5.0 | Aqueous solution with about 5% keratin-binding |
| | | domain-reactive dye 14_264 |
| | 0.5 | Hydroxyethyl Cetyldimonium Phosphate |
| | q.s. | Preservative |
| C | 6.0 | Propane/Butane |

Preparation: Solubilize phase A. Weigh phase B into phase A and dissolve until clear. Adjust the pH to 6-7, bottle with phase C.

### Example 99

### Hair-Tinting Styling Foam

| | |
|---|---|
| % | Ingredient (INCI) |

Al 1%

| | | |
|---|---|---|
| A | 2.0 | Cocotrimonium Methosulfate |
| | q.s. | Perfume oil |
| B | 84.0 | Aqua dem. |
| | 2.0 | Chitosan |
| | 1.0 | Aqueous solution with about 5% keratin-binding |
| | | domain-reactive dye 14_264 |
| | 0.5 | Dimethicone Copolyol |
| | 0.2 | Ceteareth-25 |
| | 0.2 | Panthenol |
| | 0.1 | PEG-25 PABA |
| C | 10.0 | HFC 152 A |

Al 5%

| | | |
|---|---|---|
| A | 2.0 | Cocotrimonium Methosulfate |
| | q.s. | Perfume oil |
| B | 80.0 | Aqua dem. |
| | 2.0 | Chitosan |
| | 5.0 | Aqueous solution with about 5% keratin-binding |
| | | domain-reactive dye 14_264 |
| | 0.5 | Dimethicone Copolyol |
| | 0.2 | Ceteareth-25 |
| | 0.2 | Panthenol |
| | 0.1 | PEG-25 PABA |
| C | 10.0 | HFC 152 A |

Preparation: Mix the components of phase A. Add the components of phase B one after the other and dissolve. Bottle with phase C.

### Example 100

### Care Shampoo

| | |
|---|---|
| % | Ingredient (INCI) |

Al 1%

| | | |
|---|---|---|
| A | 30.0 | Sodium Laureth Sulfate |
| | 6.0 | Sodium Cocoamphoacetate |
| | 6.0 | Cocamidopropyl Betaine |
| | 3.0 | Sodium Laureth Sulfate, Glycol Distearate, |
| | | Cocamide MEA, Laureth-10 |
| | 1.0 | Aqueous solution with about 5% keratin-binding |
| | | domain-reactive dye 14_264 |
| | 7.7 | Polyquaternium-44 |
| | 2.0 | Amodimethicone |
| | q.s. | Perfume oil |
| | q.s. | Preservative |
| | 1.0 | Sodium Chloride |
| | 43.3 | Aqua dem. |
| B | q.s. | Citric Acid |

Al 5%

| | | |
|---|---|---|
| A | 30.0 | Sodium Laureth Sulfate |
| | 6.0 | Sodium Cocoamphoacetate |
| | 6.0 | Cocamidopropyl Betaine |
| | 3.0 | Sodium Laureth Sulfate, Glycol Distearate, |
| | | Cocamide MEA, Laureth-10 |
| | 5.0 | Aqueous solution with about 5% keratin-binding |
| | | domain-reactive dye 14_264 |
| | 7.7 | Polyquaternium-44 |
| | 2.0 | Amodimethicone |
| | q.s. | Perfume oil |
| | q.s. | Preservative |
| | 1.0 | Sodium Chloride |
| | 39.3 | Aqua dem. |
| B | q.s. | Citric Acid |

Preparation: Mix the components of phase A and dissolve. Adjust the pH to 6-7 with citric acid.

### Example 101

### Shower Gel

| | |
|---|---|
| % | Ingredient (INCI) |

Al 1%

| | | |
|---|---|---|
| A | 40.0 | Sodium Laureth Sulfate |
| | 5.0 | Decyl Glucoside |
| | 5.0 | Cocamidopropyl Betaine |
| | 1.0 | Aqueous solution with about 5% keratin-binding |
| | | domain-reactive dye 14_264 |
| | 1.0 | Panthenol |
| | q.s. | Perfume oil |
| | q.s. | Preservative |
| | 2.0 | Sodium Chloride |
| | 46.0 | Aqua dem. |
| B | q.s. | Citric Acid |

Al 5%

| | | |
|---|---|---|
| A | 40.0 | Sodium Laureth Sulfate |
| | 5.0 | Decyl Glucoside |
| | 5.0 | Cocamidopropyl Betaine |
| | 5.0 | Aqueous solution with about 5% keratin-binding |
| | | domain-reactive dye 14_264 |
| | 1.0 | Panthenol |
| | q.s. | Perfume oil |
| | q.s. | Preservative |
| | 2.0 | Sodium Chloride |
| | 42.0 | Aqua dem. |
| B | q.s. | Citric Acid |

Preparation: Mix the components of phase A and dissolve. Adjust the pH to 6-7 with citric acid.

### Example 102

### Shampoo

| | |
|---|---|
| % | Ingredient (INCI) |

Al 1%

| | | |
|---|---|---|
| A | 40.0 | Sodium Laureth Sulfate |
| | 5.0 | Sodium C12-15 Pareth-15 Sulfonate |
| | 5.0 | Decyl Glucoside |
| | q.s. | Perfume oil |
| | 0.1 | Phytantriol |
| | 44.6 | Aqua dem. |
| | 1.0 | Aqueous solution with about 5% keratin-binding |
| | | domain-reactive dye 14_264 |
| | 0.3 | Polyquaternium-10 |
| | 1.0 | Panthenol |
| | q.s. | Preservative |
| | 1.0 | Laureth-3 |
| | 2.0 | Sodium Chloride |

Al 5%

| | | |
|---|---|---|
| A | 40.0 | Sodium Laureth Sulfate |
| | 5.0 | Sodium C12-15 Pareth-15 Sulfonate |
| | 5.0 | Decyl Glucoside |
| | q.s. | Perfume oil |
| | 0.1 | Phytantriol |
| | 40.6 | Aqua dem. |
| | 5.0 | Aqueous solution with about 5% keratin-binding |
| | | domain-reactive dye 14_264 |
| | 0.3 | Polyquaternium-10 |
| | 1.0 | Panthenol |
| | q.s. | Preservative |
| | 1.0 | Laureth-3 |
| | 2.0 | Sodium Chloride |

Preparation: Mix the components of phase A and dissolve. Adjust the pH to 6-7 with citric acid.

### Example 103

### Hair-Coloring Shampoo

| | |
|---|---|
| % | Ingredient (INCI) |

Al 1%

| | | |
|---|---|---|
| A | 15.00 | Cocamidopropyl Betaine |
| | 10.00 | Disodium Cocoamphodiacetate |
| | 5.00 | Polysorbate 20 |
| | 5.00 | Decyl Glucoside |
| | q.s. | Perfume oil |
| | q.s. | Preservative |
| | 1.00 | Aqueous solution with about 5% keratin-binding |
| | | domain-reactive dye 14_264 |
| | 0.15 | Guar Hydroxypropyltrimonium Chloride |
| | 2.00 | Laureth-3 |
| | 58.00 | Aqua dem. |
| | q.s. | Citric Acid |
| B | 3.00 | PEG-150 Distearate |

Al 5%

| | | |
|---|---|---|
| A | 15.00 | Cocamidopropyl Betaine |
| | 10.00 | Disodium Cocoamphodiacetate |
| | 5.00 | Polysorbate 20 |
| | 5.00 | Decyl Glucoside |
| | q.s. | Perfume oil |
| | q.s. | Preservative |
| | 5.00 | Aqueous solution with about 5% keratin-binding |
| | | domain-reactive dye 14_264 |
| | 0.15 | Guar Hydroxypropyltrimonium Chloride |
| | 2.00 | Laureth-3 |
| | 54.00 | Aqua dem. |
| | q.s. | Citric Acid |
| B | 3.00 | PEG-150 Distearate |

Preparation: Weigh in the components of phase A and dissolve. Adjust the pH to 6-7. Add phase B and heat to about 40° C. Cool to room temperature with stirring.

### Example 104

### Moisturizing Bodycare Cream

| | |
|---|---|
| % | Ingredient (INCI) |

Al 1%

| | | |
|---|---|---|
| A | 2.0 | Ceteareth-25 |
| | 2.0 | Ceteareth-6, Stearyl Alcohol |
| | 3.0 | Cetearyl Ethylhexanoate |
| | 1.0 | Dimethicone |
| | 4.0 | Cetearyl Alcohol |
| | 3.0 | Glyceryl Stearate SE |
| | 5.0 | Mineral Oil |
| | 4.0 | Simmondsia Chinensis (Jojoba) Seed Oil |
| | 3.0 | Mineral Oil, Lanolin Alcohol |
| B | 5.0 | Propylene Glycol |
| | 1.0 | Panthenol |
| | 0.5 | Magnesium Aluminum Silicate |
| | q.s | Preservative |
| | 65.5 | Aqua dem. |
| C | q.s. | Perfume oil |
| | 1.0 | Aqueous solution with about 5% keratin-binding |
| | | domain-reactive dye 14_264 |
| D | q.s. | Citric Acid |

Al 5%

| | | |
|---|---|---|
| A | 2.0 | Ceteareth-25 |
| | 2.0 | Ceteareth-6, Stearyl Alcohol |
| | 3.0 | Cetearyl Ethylhexanoate |
| | 1.0 | Dimethicone |
| | 4.0 | Cetearyl Alcohol |
| | 3.0 | Glyceryl Stearate SE |
| | 5.0 | Mineral Oil |
| | 4.0 | Simmondsia Chinensis (Jojoba) Seed Oil |
| | 3.0 | Mineral Oil, Lanolin Alcohol |
| B | 5.0 | Propylene Glycol |
| | 1.0 | Panthenol |
| | 0.5 | Magnesium Aluminum Silicate |
| | q.s | Preservative |
| | 61.5 | Aqua dem. |
| C | q.s. | Perfume oil |
| | 5.0 | Aqueous solution with about 5% keratin-binding |
| | | domain-reactive dye 14_264 |
| D | q.s. | Citric Acid |

Preparation: Heat phases A and B separately to about 80° C. Briefly prehomogenize phase B, then stir phase B into phase A and homogenize again. Cool to about 40° C., add phase C and homogenize thoroughly again. Adjust the pH to 6-7 with citric acid.

### Example 105

### Moisturizing Bodycare Cream

| | |
|---|---|
| % | Ingredient (INCI) |

Al 1%

| | | |
|---|---|---|
| A | 6.0 | PEG-7 Hydrogenated Castor Oil |
| | 10.0 | Cetearyl Ethylhexanoate |
| | 5.0 | Isopropyl Myristate |
| | 7.0 | Mineral Oil |
| | 0.5 | Shea Butter (Butyrospermum Parkii) |
| | 0.5 | Aluminum Stearate |
| | 0.5 | Magnesium Stearate |
| | 0.2 | Bisabolol |
| | 0.7 | Quaternium-18-Hectorite |
| B | 5.0 | Dipropylene Glycol |
| | 0.7 | Magnesium Sulfate |
| | q.s. | Preservative |
| | 62.9 | Aqua dem. |
| C | q.s. | Perfume oil |
| | 1.0 | Aqueous solution with about 5% keratin-binding |
| | | domain-reactive dye 14_264 |

Al 5%

| | | |
|---|---|---|
| A | 6.0 | PEG-7 Hydrogenated Castor Oil |
| | 10.0 | Cetearyl Ethylhexanoate |
| | 5.0 | Isopropyl Myristate |
| | 7.0 | Mineral Oil |
| | 0.5 | Shea Butter (Butyrospermum Parkii) |
| | 0.5 | Aluminum Stearate |
| | 0.5 | Magnesium Stearate |
| | 0.2 | Bisabolol |
| | 0.7 | Quaternium-18-Hectorite |
| B | 5.0 | Dipropylene Glycol |
| | 0.7 | Magnesium Sulfate |
| | q.s. | Preservative |
| | 58.9 | Aqua dem. |
| C | q.s. | Perfume oil |
| | 5.0 | Aqueous solution with about 5% keratin-binding |
| | | domain-reactive dye 14_264 |

Preparation: Heat phases A and B separately to about 80° C. Stir phase B into phase A and homogenize. Cool to about 40° C. with stirring, add phase C and homogenize again. Allow to cool to room temperature with stirring.

### Example 106

### Liquid Make-Up—O/W Type

| | |
|---|---|
| % | Ingredient (INCI) |

Al 1%

| | | |
|---|---|---|
| A | 2.0 | Ceteareth-6, Stearyl Alcohol |
| | 2.0 | Ceteareth-25 |
| | 6.0 | Glyceryl Stearate |
| | 1.0 | Cetyl Alcohol |
| | 8.0 | Mineral Oil |
| | 7.0 | Cetearyl Ethylhexanoate |
| | 0.2 | Dimethicone |
| B | 3.0 | Propylene Glycol |
| | 1.0 | Panthenol |
| | q.s. | Preservative |
| | 61.9 | Aqua dem. |
| C | 0.1 | Bisabolol |
| | 1.0 | Aqueous solution with about 5% keratin-binding |
| | | domain-reactive dye 14_264 |
| | q.s. | Perfume oil |
| D | 5.7 | C.I. 77 891, Titanium Dioxide |
| | 1.1 | Iron Oxides |

Al 5%

| | | |
|---|---|---|
| A | 2.0 | Ceteareth-6, Stearyl Alcohol |
| | 2.0 | Ceteareth-25 |
| | 6.0 | Glyceryl Stearate |
| | 1.0 | Cetyl Alcohol |
| | 8.0 | Mineral Oil |
| | 7.0 | Cetearyl Ethylhexanoate |
| | 0.2 | Dimethicone |
| B | 3.0 | Propylene Glycol |
| | 1.0 | Panthenol |
| | q.s. | Preservative |
| | 57.9 | Aqua dem. |
| C | 0.1 | Bisabolol |
| | 5.0 | Aqueous solution with about 5% keratin-binding |
| | | domain-reactive dye 14_264 |
| | q.s. | Perfume oil |
| D | 5.7 | C.I. 77 891, Titanium Dioxide |
| | 1.1 | Iron Oxides |

Preparation: Heat phases A and B separately to about 80° C.. Stir phase B into phase A and homogenize. Cool to about 40° C. with stirring, add phases C and D and thoroughly homogenize again. Allow to cool to room temperature with stirring.

### Example 107

[0697] Dermocosmetic preparations according to the invention are described below comprising the keratin-binding effector molecule prepared according to Example 19 (keratin-binding domain according to SEQ ID No.: ID 168 coupled with the dye 14_{—}264). Said keratin-binding effector molecule is referred to in the examples below as keratin-binding domain-reactive dye 14 264. It will be appreciated by the person skilled in the art that all of the other dyes described in Tables 6 and 7 can also be coupled with the KBD according to Example 19, 19 a or 19 b and can be used in the preparations given below.

[0698] The specified keratin-binding domain-reactive dye 14_{—}264 KBD-D (SEQ ID No.: 168) is used as an approximately 5% strength by weight aqueous solution. The following data are parts by weight.

[0699] Clear Hair-Coloring Shampoo

| Ingredients (INCI) | 1 | 2 | 3 | 4 | 5 |
|---|---|---|---|---|---|
| Sodium Laureth Sulfate | — | 15.00 | 10.50 | 12.50 | — |
| Codamidopropyl Betaine | 7.50 | 7.00 | 5.00 | 5.50 | 10.00 |
| PEG-7 Glyceryl Cocoate | 2.00 | 2.50 | 3.50 | 5.00 | 2.30 |
| Perfume oil | 0.10 | 0.10 | 0.10 | 0.10 | 0.10 |
| Keratin-binding domain- | 1.0 | 5.0 | 0.1 | 0.5 | 10.0 |
| reactive dye 14_264 | | | | | |
| D-Panthenol USP | 1.00 | 1.50 | 1.80 | 1.70 | 1.40 |
| Preservative | 0.10 | 0.10 | 0.10 | 0.10 | 0.10 |
| Citric Acid | 0.10 | 0.10 | 0.10 | 0.10 | 0.10 |
| Luviquat ® Ultra Care | 1.50 | 1.00 | 1.50 | 1.20 | 1.10 |
| Sodium Chloride | 1.50 | 1.40 | 1.40 | 1.30 | 1.50 |
| Aqua dem. | ad 100 | ad 100 | ad 100 | ad 100 | ad 100 |

[0700] Hair-Coloring Shampoo

| Ingredients (INCI) | 1 | 2 | 3 | 4 | 5 |
|---|---|---|---|---|---|
| Sodium Laureth Sulfate | 35.00 | — | 5.00 | 1.00 | — |
| Decyl Glucoside | 5.00 | 5.50 | 4.90 | 3.50 | 7.00 |
| Cocamidopropyl Betaine | 10.00 | 5.00 | 12.50 | 7.50 | 15.00 |
| Perfume oil | 0.10 | 0.10 | 0.10 | 0.10 | 0.10 |
| Keratin-binding domain- | 1.0 | 5.0 | 0.1 | 20.0 | 5.0 |
| reactive dye 14_264 | | | | | |
| D-Panthenol USP | 0.50 | 1.00 | 0.80 | 1.50 | 0.50 |
| Preservative | 0.10 | 0.10 | 0.10 | 0.10 | 0.10 |
| Citric Acid | 0.10 | 0.10 | 0.10 | 0.10 | 0.10 |
| Laureth-3 | 0.50 | 2.00 | 0.50 | 0.50 | 2.00 |
| Sodium Chloride | 1.50 | 1.50 | 1.50 | 1.50 | 1.50 |
| Aqua dem. | ad 100 | ad 100 | ad 100 | ad 100 | ad 100 |

[0701] Clear Conditioner Shampoo for Hair Coloring

| Ingredients (INCI) | 1 | 2 | 3 | 4 | 5 |
|---|---|---|---|---|---|
| ® Disodium | 10.00 | 15.00 | 20.00 | 12.00 | 17.00 |
| Cocoamphodiacetate | | | | | |
| ® Decyl Glucoside | 5.00 | 6.00 | 7.00 | 8.00 | 4.00 |
| ® Cocamidopropyl | 15.00 | 12.00 | 10.00 | 18.00 | 20.00 |
| Betaine | | | | | |
| Luviquat ® FC 550 | 0.30 | 0.20 | 0.20 | 0.20 | 0.30 |
| Perfume oil | 0.10 | 0.10 | 0.10 | 0.10 | 0.10 |
| Keratin-binding domain- | 20.0 | 5.0 | 1.0 | 0.5 | 10.0 |
| reactive dye 14_264 | | | | | |
| Cremophor ® PS 20 | 5.00 | 1.00 | 1.00 | 7.00 | 5.00 |
| Preservative | 0.10 | 0.10 | 0.10 | 0.10 | 0.10 |
| Laureth-3 | — | 1.00 | 0.50 | 2.00 | — |
| Citric Acid | 0.20 | 0.20 | 0.20 | 0.20 | 0.20 |
| PEG-12 Distearate | 3.00 | 2.00 | 2.00 | 3.00 | 2.50 |
| Aqua dem. | ad 100 | ad 100 | ad 100 | ad 100 | ad 100 |

[0702] Hair-Tinting Foam O/W Emulsions

| | Emulsion 1 | % by | Emulsion 2 | % by |
|---|---|---|---|---|
| | % by wt. | vol. | % by wt. | vol. |
| Stearic Acid | 5.00 | | 1.00 | |
| Cetyl Alcohol | 5.50 | | | |
| Cetearyl Alcohol | | | 2.00 | |
| PEG-40 Stearate | 8.50 | | | |
| PEG-20 Stearate | | | 1.00 | |
| Caprylic/Capric Triglyceride | 4.00 | | 2.00 | |
| C12-15 Alkyl Benzoate | 10.00 | | 15.00 | |
| Cyclomethicone | 4.00 | | | |
| Dimethicone | | | 0.50 | |
| Keratin-binding domain- | 5.0 | | 10.0 | |
| reactive dye 14_264 | | | | |
| Ethylhexyl Isostearate | | | 5.00 | |
| Myristyl Myristate | | | 2.00 | |
| Ceresin | 1.50 | | | |
| Glycerin | | | 3.00 | |
| Hydroxypropyl Starch | 1.00 | | 3.50 | |
| Phosphate | | | | |
| BHT | | | 0.02 | |
| Disodium EDTA | 0.50 | | 0.10 | |
| Perfume oil, Preservative | q.s. | | q.s. | |
| Potassium Hydroxide | q.s. | | q.s. | |
| Aqua dem. | ad 100 | | ad 100 | |
| | adjust pH | | adjust pH | |
| | to 6.5-7.5 | | to 5.0-6.0 | |
| Emulsion 1 | | 70 | | |
| Emulsion 2 | | | | 35 |
| Nitrogen | | 30 | | |
| Propane/Butane | | | | 65 |

[0703] Hair-Coloring Conditioner Shampoo with Pearlescence

| | 1 | 2 | 3 |
|---|---|---|---|
| Polyquaternium-10 | 0.50 | 0.50 | 0.40 |
| Sodium Laureth Sulfate | 9.00 | 8.50 | 8.90 |
| Cocamidopropyl Betaine | 2.50 | 2.60 | 3.00 |
| Uvinul ® MS 40 | 1.50 | 0.50 | 1.00 |
| Keratin-binding domain-reactive | 1.0 | 5.0 | 0.5 |
| dye 14_264 | | | |
| Pearlescent solution | 2.00 | 2.50 | |
| Disodium EDTA | 0.10 | 0.15 | 0.05 |
| Preservative, Perfume oil, Thickener | q.s. | q.s. | q.s. |
| Aqua dem. | ad 100 | ad 100 | ad 100 |

adjust pH to 6.0

[0704] Clear Hair-Coloring Conditioner Shampoo

| | 1 | 2 | 3 |
|---|---|---|---|
| Polyquaternium-10 | 0.50 | 0.50 | 0.50 |
| Sodium Laureth Sulfate | 0.2 | — | 0.1 |
| Keratin-binding domain-reactive | 5.0 | 10.0 | 20.0 |
| dye 14_264 | | | |
| Uvinul ® M 40 | 1.00 | 1.50 | 0.50 |
| Preservative, Perfume oil, Thickener | q.s. | q.s. | q.s. |
| Aqua dem. | ad 100 | ad 100 | ad 100 |

adjust pH to 6.0

[0705] Clear Conditioner Shampoo with Volume Effect for Hair Coloring

| | 1 | 2 | 3 |
|---|---|---|---|
| Sodium Laureth Sulfate | — | 0.5 | 1.00 |
| Uvinul ® MC 80 | 2.00 | 1.50 | 2.30 |
| Keratin-binding domain-reactive | 10.0 | 15.0 | 5.0 |
| dye 14_264 | | | |
| Cocamidopropyl Betaine | 2.50 | 2.60 | 2.20 |
| Disodium EDTA | 0.01 | 0.10 | 0.01 |
| Preservative, Perfume oil, Thickener | q.s. | q.s. | q.s. |
| Aqua dem. | ad 100 | ad 100 | ad 100 |

adjust pH to 6.0

[0706] Hair-Tinting Gel Cream

| | 1 | 2 | 3 | 4 |
|---|---|---|---|---|
| Acrylates/C10-30 Alkylacrylate Crosspolymer | 0.40 | 0.35 | 0.40 | 0.35 |
| Carbomer | 0.20 | 0.22 | 0.20 | 0.22 |
| Xanthan Gum | 0.10 | 0.13 | 0.10 | 0.13 |
| Cetearyl Alcohol | 3.00 | 2.50 | 3.00 | 2.50 |
| C12-15 Alkyl Benzoate | 4.00 | 4.50 | 4.00 | 4.50 |
| Caprylic/Capric Triglyceride | 3.00 | 3.50 | 3.00 | 3.50 |
| Uvinul ® A Plus ™ | 2.00 | 1.50 | 0.75 | 1.00 |
| UvaSorb ® k2A | | 3.00 | | |
| Ethylhexyl Bis-Isopentylbenzoxazolylphenyl | | | | |
| Melamine | | | | |
| Uinul ® MC 80 | 3.00 | | 1.00 | |
| Bis-Ethylhexyloxyphenol Methoxyphenyl Triazine | | 1.50 | | 2.00 |
| Butyl Methoxydibenzoylmethane | | | 2.00 | |
| Disodium Phenyl Dibenzimidazole Tetrasulfonate | 2.50 | | 0.50 | 2.00 |
| Uvinul ® T 150 | 4.00 | | 3.00 | 4.00 |
| Uvinul ® N 539 T | | 4.00 | | |
| Diethylhexyl Butamido Triazone | 1.00 | | | 2.00 |
| Phenylbenzimidazole Sulfonic Acid | 0.50 | | 3.00 | |
| Methylene Bis-Benzotriazolyl | 2.00 | | 0.50 | 1.50 |
| Tetramethylbutylphenol | | | | |
| Ethylhexyl Salicylate | | | 3.00 | |
| Drometrizole Trisiloxane | | | 0.50 | |
| Terephthalidene Dicamphor Sulfonic Acid | | 1.50 | | 1.00 |
| Diethylhexyl 2,6-Naphthalate | 3.50 | 4.00 | 7.00 | 9.00 |
| Titanium Dioxide-microfine | 1.00 | | 3.00 | |
| Zinc Oxide-microfine | | | | 0.25 |
| Keratin-binding domain-reactive dye 14_264 | 5.0 | 20.0 | 1.0 | 10.0 |
| Cyclomethicone | 5.00 | 5.50 | 5.00 | 5.50 |
| Dimethicone | 1.00 | 0.60 | 1.00 | 0.60 |
| Glycerin | 1.00 | 1.20 | 1.00 | 1.20 |
| Sodium Hydroxide | q.s. | q.s. | q.s. | q.s. |
| Preservative | 0.30 | 0.23 | 0.30 | 0.23 |
| Perfume oil | 0.20 | | 0.20 | |
| Aqua dem. | ad 100 | ad 100 | ad 100 | ad 100 |

adjust pH to 6.0

[0707] OW Sunscreen Formulation

| | 1 | 2 | 3 | 4 | 5 | 6 | 7 |
|---|---|---|---|---|---|---|---|
| Glyceryl Stearate SF | 0.50 | 1.00 | 3.00 | | | 1.50 | |
| Glyceryl Stearate Citrate | 2.00 | | 1.00 | 2.00 | 4.00 | | |
| Stearic Acid | | 3.00 | | 2.00 | | | |
| PEG-40 Stearate | 0.50 | | | | | 2.00 | |
| Cetyl Phosphate | | | | | | 1.00 | |
| Sodium Cetearyl Sulfate | | | | | | | 0.75 |
| Stearyl Alcohol | | | 3.00 | | | 2.00 | 0.60 |
| Cetyl Alcohol | 2.50 | 1.10 | | 1.50 | 0.60 | | 2.00 |
| Keratin-binding domain-reactive | 10.0 | 0.5 | 3.0 | 5.0 | 0.1 | 15.0 | 7.5 |
| dye 14_264 | | | | | | | |
| UvaSorb ® k2A | | | | | | | |
| Ethylhexyl Bis- | | | | | | | |
| Isopentylbenzoxazolylphenyl | | | | | | | |
| Melamine | | | | | | | |
| Ethylhexyl Methoxycinnamate | | | | | 5.00 | 6.00 | 8.00 |
| Uvinul ® MC 80 | | | | | | | |
| Bis-Ethylhexyloxyphenol | | 1.50 | | 2.00 | 2.50 | | 2.50 |
| Methoxyphenyl Triazine | | | | | | | |
| Butyl Methoxydibenzoylmethane | | | 2.00 | | 2.00 | 1.50 | |
| Disodium Phenyl Dibenzimidazole | 2.50 | | 0.50 | 2.00 | | 0.30 | |
| Tetrasulfonate | | | | | | | |
| Ethylhexyl Triazone Uvinul ® T 150 | 4.00 | | 3.00 | 4.00 | | 2.00 | |
| Octocrylene | | 4.00 | | | | | 7.50 |
| Uvinul ® N 539 T | | | | | | | |
| Diethylhexyl Butamido Triazone | 1.00 | | | 2.00 | 1.00 | | 1.00 |
| Phenylbenzimidazole Sulfonic Acid | 0.50 | | 3.00 | | | | |
| Methylene Bis-Benzotriazolyl | 2.00 | | 0.50 | 1.50 | 2.50 | | |
| Tetramethylbutylphenol | | | | | | | |
| Ethylhexyl Salicylate | | | 3.00 | | | | 5.00 |
| Drometrizole Trisiloxane | | | 0.50 | | | 1.00 | |
| Terephthalidene Dicamphor | | 1.50 | | 1.00 | 1.00 | | 0.50 |
| Sulfonic Acid | | | | | | | |
| Diethylhexyl 2,6-Naphthalate | 3.50 | | 7.00 | | 6.00 | 9.00 | |
| Titanium Dioxide-microfine | 1.00 | | 3.00 | | 3.50 | | 1.50 |
| Zinc Oxide-microfine | | | | 0.25 | | 2.00 | |
| C12-15 Alkyl Beozoate | | 0.25 | | | 4.00 | 7.00 | |
| Dicapryl Ether | | | 3.50 | | 2.00 | | |
| Butylene Glycol | 5.00 | | 6.00 | | | | |
| Dicaprylate/Dicaprate | | | | | | | |
| Cocoglyceride | | | 6.00 | | 2.00 | | |
| Dimethicone | 0.50 | | 1.00 | | 2.00 | | |
| Cyclomethicone | 2.00 | | 0.50 | | 0.50 | | |
| Butyrospermum Parkii (Shea | | 2.00 | | | | | |
| Butter) | | | | | | | |
| VP/Hexadecene Copolymer | 0.20 | | | 0.50 | | 1.00 | |
| Glycerin | 3.00 | 7.50 | | 7.50 | 5.00 | | 2.50 |
| Xanthan Gum | 0.15 | | 0.05 | | | 0.30 | |
| Sodium Carbomer | | 0.20 | | 0.15 | 0.25 | | |
| Vitamin E Acetate | 0.60 | | 0.23 | | 0.70 | 1.00 | |
| Biosaccharide Gum-1 | | 3.00 | 10.00 | | | | |
| Glycine Soja (Soybean) Oil | | | | 0.50 | | 1.50 | 1.00 |
| Ethylhexylglycerin | 0.30 | | | | | | |
| DMDM Hydantoin | | 0.60 | 0.40 | 0.20 | | | |
| Iodopropynyl Butylcarbamate | | | | 0.18 | 0.20 | | |
| Methylparaben | 0.15 | | 0.25 | | 0.50 | | |
| Phenoxyethanol | 1.00 | 0.40 | | | 0.40 | 0.50 | 0.40 |
| Trisodium EDTA | 0.02 | | 0.05 | | | | |
| Tetrasodium iminodisuccinate | | | | 0.25 | 1.00 | | |
| Ethanol | 2.00 | 1.50 | | 3.00 | | 1.20 | 5.00 |
| Perfume oil | 0.10 | 0.25 | 0.30 | | 0.40 | 0.20 | |
| Aqua dem. | ad 100 | ad 100 | ad 100 | ad 100 | ad 100 | ad100 | ad 100 |

[0708] Hydrodispersion

| | 1 | 2 | 3 | 4 | 5 |
|---|---|---|---|---|---|
| Ceteaereth-20 | 1.00 | | | 0.50 | |
| Cetyl Alcohol | | | 1.00 | | |
| Sodium Carbomer | | 0.20 | | 0.30 | |
| Acrylates/C10-30 Alkyl Acrylate | 0.50 | | 0.40 | 0.10 | 0.50 |
| Crosspolymer | | | | | |
| Xanthan Gum | | 0.30 | 0.15 | | |
| Keratin-binding domain-reactive dye | 5.0 | 0.5 | 3.0 | 0.1 | 10.0 |
| 14_264 | | | | | |
| UvaSorb ® k2A Ethylhexyl Bis- | | 3.50 | | | |
| Isopentylbenzoxazolylphenyl Melamine | | | | | |
| Ethylhexyl Methoxycinnamate Uvinul ® MC 80 | | | | | 5.00 |
| Bis-Ethylhexyloxyphenol Methoxyphenyl | | 1.50 | | 2.00 | 2.50 |
| Triazine | | | | | |
| Butyl Methoxydibenzoylmethane | | | 2.00 | | 2.00 |
| Disodium Phenyl Dibenzimidazole | 2.50 | | 0.50 | 2.00 | |
| Tetrasulfonate | | | | | |
| Ethyhexyl Triazone Uvinul ® T 150 | 4.00 | | 3.00 | 4.00 | |
| Octocrylene | | 4.00 | | | |
| Uvinul ® N 539 T | | | | | |
| Diethylhexyl Butamido Triazone | 1.00 | | | 2.00 | 1.00 |
| Phenylbenzimidazole Sulfonic Acid | 0.50 | | 3.00 | | |
| Methylene Bis-Benzotriazolyl | 2.00 | | 0.50 | 1.50 | 2.50 |
| Tetramethylbutylphenol | | | | | |
| Ethylhexyl Salicylate | | | 3.00 | | |
| Drometrizole Trisiloxane | | | 0.50 | | |
| Terephthalidene Dicamphor Sulfonic Acid | | 1.50 | | 1.00 | 1.00 |
| Diethylhexyl 2,6-Naphthalate | | | 7.00 | | 9.00 |
| Titanium Dioxide-microfine | 1.00 | | 3.00 | | 3.50 |
| Zinc Oxide-microfine | | | | 0.25 | |
| C12-15 Alkyl Benzoate | 2.00 | 2.50 | | | |
| Dicaprylyl Ether | | 4.00 | | | |
| Butylene Glycol Dicaprylate/Dicaprate | 4.00 | | 2.00 | 6.00 | |
| Dicaprylyl Carbonate | | 2.00 | 6.00 | | |
| Dimethicone | | 0.50 | 1.00 | | |
| Phenyl Trimethicone | 2.00 | | 0.50 | | |
| Butyrospermum Parkii (Shea Butter) | | 2.00 | | 5.00 | |
| VP/Hexadecene Copolymer | 0.50 | | | 0.50 | 1.00 |
| Tricontanyl PVP | 0.50 | | 1.00 | | |
| Ethylhexylglycerin | | | 1.00 | | 0.80 |
| Glycerin | 3.00 | 7.50 | | 7.50 | 8.50 |
| Glycine Soja (Soybean) Oil | | | 1.50 | | 1.00 |
| Vitamin E Acetate | 0.50 | | 0.25 | | 1.00 |
| Glucosylrutin | 0.60 | | | 0.25 | |
| Biosaccharide Gum-1 | | 2.50 | 0.50 | | 2.00 |
| DMDM Hydantoin | | 0.60 | 0.45 | 0.25 | |
| Iodopropynyl Butylcarbamate | 0.20 | | | | |
| Methylparaben | 0.50 | | 0.25 | 0.15 | |
| Phenoxyethanol | 0.50 | 0.40 | | 1.00 | |
| Trisodium EDTA | | 0.01 | 0.05 | | 0.10 |
| Ethanol | 3.00 | 2.00 | 1.50 | | 7.00 |
| Perfume oil | 0.20 | | 0.05 | 0.40 | |
| Aqua dem. | ad 100 | ad 100 | ad 100 | ad 100 | ad 100 |

[0709] WO Sunscreen Emulsion

| | 1 | 2 | 3 | 4 | 5 |
|---|---|---|---|---|---|
| Cetyl Dimethicone | | 2.50 | | 4.00 | |
| Polyglyceryl-2 Dipolyhydroxystearate | 5.00 | | | | 4.50 |
| PEG-30 Dipolyhydroxystearate | | | 5.00 | | |
| Keratin-binding domain-reactive dye 14_264 | 5.0 | 1.0 | 10.0 | 0.5 | 15.0 |
| UvaSorb ® k2A | | 2.00 | | | |
| Ethylhexyl Bis-Isopentylbenzoxazolylphenyl | | | | | |
| Melamine | | | | | |
| Ethylhexyl Methoxycinnamate Uvinul ® MC 80 | | | | | 5.00 |
| Bis-Ethylhexyloxyphenol Methoxyphenyl | | 1.50 | | 2.00 | 2.50 |
| Triazine | | | | | |
| Butyl Methoxydibenzoylmethane | | | 2.00 | | 2.00 |
| Disodium Phenyl Dibenzimidazole | 2.50 | | 0.50 | 2.00 | |
| Tetrasulfonate | | | | | |
| Ethylhexyl Triazone Uvinul ® T 150 | 4.00 | | 3.00 | 4.00 | |
| Octocrylene | | 4.00 | | | |
| Diethylhexyl Butamido Triazone | 1.00 | | | 2.00 | 1.00 |
| Phenylbenzimidazole Sulfonic Acid | 0.50 | | 3.00 | | |
| Methylene Bis-Benzotriazolyl | 2.00 | | 0.50 | 1.50 | 2.50 |
| Tetramethylbutylphenol | | | | | |
| Ethylhexyl Salicylate | | | 3.00 | | |
| Drometrizole Trisiloxane | | | 0.50 | | |
| Terephthalidene Dicamphor Sulfonic Acid | | 1.50 | | 1.00 | 1.00 |
| Diethylhexyl 2,6-Naphthalate | | | 7.00 | | 4.00 |
| Titanium Dioxide-microfine | 1.00 | | 3.00 | | 3.50 |
| Zinc Oxide-microfine | | | | 0.25 | |
| Mineral Oil | | 12.00 | 10.00 | | 8.00 |
| C12-15 Alkyl Benzoate | | | | 9.00 | |
| Dicaprylyl Ether | 10.00 | | | | 7.00 |
| Butylene Glycol Dicaprylate/Dicaprate | | | 2.00 | 8.00 | 4.00 |
| Dicaprylyl Carbonate | 5.00 | | 6.00 | | |
| Dimethicone | | 4.00 | 1.00 | 5.00 | |
| Cyclomethicone | 2.00 | 25.00 | | | 2.00 |
| Butyrospermum Parkii (Shea Butter) | | | 3.00 | | |
| Petrolatum | | 4.50 | | | |
| VP/Hexadecene Copolymer | 0.50 | | | 0.50 | 1.00 |
| Ethylhexylglycerin | | 0.30 | 1.00 | | 0.50 |
| Glycerin | 3.00 | 7.50 | | 7.50 | 8.50 |
| Glycine Soja (Soybean) Oil | | 1.00 | 1.50 | | 1.00 |
| Magnesium Sulfate MgSO₄ | 1.00 | 0.50 | | 0.50 | |
| Magnesium Chloride MgCl₂ | | | 1.00 | | 0.70 |
| Vitamin E Acetate | 0.50 | | 0.25 | | 1.00 |
| Ascorbyl Palmitate | 0.50 | | | 2.00 | |
| Biosaccharide Gum-1 | | | | 3.50 | 1.00 |
| DMDM Hydantoin | | 0.60 | 0.40 | 0.20 | |
| Methylparaben | 0.50 | | 0.25 | 0.15 | |
| Phenoxyethanol | 0.50 | 0.40 | | 1.00 | |
| Trisodium EDTA | 0.12 | 0.05 | | 0.30 | |
| Ethanol | 3.00 | | 1.50 | | 5.00 |
| Perfume oil | 0.20 | | 0.40 | 0.35 | |
| Aqua dem. | ad 100 | ad 100 | ad 100 | ad 100 | ad 100 |

[0710] Sticks

| | 1 | 2 | 3 | 4 |
|---|---|---|---|---|
| Caprylic/Capric Triglyceride | 12.00 | 10.00 | 6.00 | |
| Octyldodecanol | 7.00 | 14.00 | 8.00 | 3.00 |
| Butylene Glycol | | | | 12.00 |
| Dicaprylate/Dicaprate | | | | |
| Pentaerythrityl Tetraisostearate | 10.00 | 6.00 | 8.00 | 7.00 |
| Polyglyceryl-3 Diisostearate | 2.50 | | | |
| Bis-Diglyceryl Polyacyladipate-2 | 9.00 | 8.00 | 10.00 | 8.00 |
| Cetearyl Alcohol | 8.00 | 11.00 | 9.00 | 7.00 |
| Myristyl Myristate | 3.50 | 3.00 | 4.00 | 3.00 |
| Beeswax | 5.00 | 5.00 | 6.00 | 6.00 |
| Copernicia Cerifera (Carnauba) | 1.50 | 2.00 | 2.00 | 1.50 |
| Wax | | | | |
| Cera Alba | 0.50 | 0.50 | 0.50 | 0.40 |
| C16-40 Alkyl Stearate | | 1.50 | 1.50 | 1.50 |
| Keratin-binding domain-reactive | 0.5 | 3.0 | 1.0 | 5.0 |
| dye 14_264 | | | | |
| UvaSorb ® k2A | | 2.00 | | 4.00 |
| Ethylhexyl Bis- | | | | |
| Isopentylbenzoxazolylphenyl | | | | |
| Melamine | | | | |
| Ethylhexyl Methoxycinnamate | | 3.00 | | |
| Uvinul ® MC 80 | | | | |
| Bis-Ethylhexyloxyphenol | | 1.50 | | 2.00 |
| Methoxyphenyl Triazine | | | | |
| Butyl Methoxydibenzoylmethane | | | 2.00 | |
| Disodium Phenyl Dibenzimidazole | 2.50 | | 0.50 | 2.00 |
| Tetrasulfonate | | | | |
| Ethylhexyl Triazone Uvinul ® T | 4.00 | | 3.00 | 4.00 |
| 150 | | | | |
| Octocrylene | | 4.00 | | |
| Diethylhexyl Butamido Triazone | 1.00 | | | 2.00 |
| Phenylbenzimidazole Sulfonic | 0.50 | | 3.00 | |
| Acid | | | | |
| Methylene Bis-Benzotriazolyl | 2.00 | | 0.50 | 1.50 |
| Tetramethylbutylphenol | | | | |
| Ethylhexyl Salicylate | | | 3.00 | |
| Drometrizole Trisiloxane | | | 0.50 | |
| Terephthalidene Dicamphor | | 1.50 | | 1.00 |
| Sulfonic Acid | | | | |
| Diethylhexyl 2,6-Naphthalate | | | 7.00 | |
| Titanium Dioxide-microfine | 1.00 | | 3.00 | |
| Zinc Oxide-microfine | | | | 0.25 |
| Vitamin E Acetate | 0.50 | 1.00 | | |
| Ascorbyl Palmitate | 0.05 | | 0.05 | |
| Buxux Chinensis (Jojoba) Oil | 2.00 | 1.00 | | 1.00 |
| Perfume oil, BHT | 0.10 | 0.25 | | 0.35 |
| Ricinus Communis (Castor) Oil | ad 100 | ad 100 | ad 100 | ad 100 |

[0711] PIT Emulsion

| | 1 | 2 | 3 | 4 | 5 | 6 | 7 | 8 |
|---|---|---|---|---|---|---|---|---|
| Glyceryl Monostearate SE | 0.50 | 2.00 | 3.00 | 5.00 | | 0.50 | 4.00 | |
| Glyceryl Isostearate | | | | | 3.50 | 4.00 | 2.00 | |
| Isoceteth-20 | | 0.50 | | | 2.00 | | | |
| Ceteareth-12 | | 5.00 | | 1.00 | | | 3.50 | 5.00 |
| Ceteareth-20 | | 5.00 | | 1.00 | | | | 3.50 |
| PEG-100 Stearate | | | | 2.80 | | 2.30 | 3.30 | |
| Cetyl Alcohol | 5.20 | | 1.20 | 1.00 | 1.30 | | 0.50 | 0.30 |
| Cetyl Palmitate | 2.50 | 1.20 | | 1.50 | | 0.50 | | 1.50 |
| Cetyl Dimethicone | | | | 0.50 | | 1.00 | | |
| Copolyol | | | | | | | | |
| Polyglyceryl-2 Dioleate | | | | 0.75 | 0.30 | | | |
| Keratin-binding domain- | 0.1 | 5.0 | 0.01 | 0.5 | 20.0 | 0.25 | 10.0 | 3.0 |
| reactive dye 14_264 | | | | | | | | |
| UvaSorb ® k2A | | | 4.00 | | | | 1.50 | |
| Ethylhexyl Bis- | | | | | | | | |
| Isopentylbenzoxazolyl- | | | | | | | | |
| phenyl Melamine | | | | | | | | |
| Ethylhexyl | | | | | 5.00 | 6.00 | 8.00 | 5.00 |
| Methoxycinnamate | | | | | | | | |
| Uvinul ® MC 80 | | | | | | | | |
| Bis-Ethylhexyloxyphenol | | 1.50 | | 2.00 | 2.50 | | 2.50 | 2.50 |
| Methoxyphenyl Triazine | | | | | | | | |
| Butyl Methoxydibenzoyl- | | | 2.00 | | 2.00 | 1.50 | | 2.00 |
| methane | | | | | | | | |
| Disodium Phenyl | 2.50 | | 0.50 | 2.00 | | 0.30 | | |
| Dibenzimidazole | | | | | | | | |
| Tetrasulfonate | | | | | | | | |
| Ethylhexyl Triazone | 4.00 | | 3.00 | 4.00 | | 2.00 | | |
| Uvinul ® T 150 | | | | | | | | |
| Octocrylene | | 4.00 | | | | | 7.50 | |
| Diethylhexyl Butamido | 1.00 | | | 2.00 | 1.00 | | 1.00 | 1.00 |
| Triazone | | | | | | | | |
| Phenylbenzimidazole | 0.50 | | 3.00 | | | | | |
| Sulfonic Acid | | | | | | | | |
| Methylene Bis- | 2.00 | | 0.50 | 1.50 | 2.50 | | | 2.50 |
| Benzotriazolyl | | | | | | | | |
| Tetramethylbutylphenol | | | | | | | | |
| Ethylhexyl Salicylate | | | 3.00 | | | | 5.00 | |
| Drometrizole Trisiloxane | | | 0.50 | | | 1.00 | | |
| Terephthalylidene | | 1.50 | | 1.00 | 1.00 | | 0.50 | 1.00 |
| Dicamphor Sulfonic Acid | | | | | | | | |
| Diethylhexyl 2,6- | | | 7.00 | | 10.00 | 7.50 | | 8.00 |
| Naphthalate | | | | | | | | |
| Titanium | 1.00 | | 3.00 | | 3.50 | | 1.50 | 3.50 |
| Dioxide-microfine | | | | | | | | |
| Zinc Oxide-microfine | | | | 0.25 | | 2.00 | | |
| C12-15 Alkyl Benzoate | 3.50 | | | 6.35 | | | | 0.10 |
| Cocoglyceride | | 3.00 | | 3.00 | | | | 1.00 |
| Dicaprylyl Ether | 4.50 | | | | | | | |
| Dicaprylyl Carbonate | | 4.30 | | 3.00 | | | | 7.00 |
| Dibutyl Adipate | | | | 0.50 | | | | 0.30 |
| Phenyl Trimethicone | 2.00 | | | 3.50 | | 2.00 | | |
| Cyclomethicone | | 3.00 | | | | | | |
| C1-5 Alkyl | | 0.50 | | | 2.00 | | | |
| Galactomannan | | | | | | | | |
| Hydrogenated Coco- | | | | | 3.00 | 4.00 | | |
| glycerides | | | | | | | | |
| Behenoxy Dimethicone | | | | | | 1.50 | 2.00 | |
| VP/Hexadecene | | | | 1.00 | 1.20 | | | |
| Copolymer | | | | | | | | |
| Glycerin | 4.00 | 6.00 | 5.00 | | 8.00 | 10.00 | | |
| Vitamin E Acetate | 0.20 | 0.30 | 0.40 | | 0.30 | | | |
| Butyrospermum Parkii | | 2.00 | | 3.60 | | 2.00 | | |
| (Shea Butter) | | | | | | | | |
| Iodopropyl | 0.12 | | | | 0.20 | | | |
| Butylcarbamate | | | | | | | | |
| Biosaccharide Gum-1 | | | | 0.10 | | | | |
| DMDM Hydantoin | 0.10 | | | | 0.12 | | 0.13 | |
| Methylparaben | | 0.50 | 0.30 | | 0.35 | | | |
| Phenoxyethanol | 0.50 | 0.40 | | 1.00 | | | | |
| Ethylhexylglycerin | | 0.30 | | | 1.00 | | 0.35 | |
| Ethanol | 2.00 | | 2.00 | | | 5.00 | | |
| Trisodium EDTA | 0.40 | | 0.15 | | | 0.20 | | |
| Perfume oil | 0.20 | | 0.20 | | 0.24 | 0.16 | 0.10 | 0.10 |
| Aqua dem. | ad 100 | ad 100 | ad 100 | ad 100 | ad 100 | ad 100 | ad 100 | ad 100 |

[0712] Skin- or Hair-Tinting Gel Cream

| | 1 | 2 | 3 | 4 |
|---|---|---|---|---|
| Acrylates/C10-30 Alkylacrylate | 0.40 | 0.35 | 0.40 | 0.35 |
| Crosspolymer | | | | |
| Carbomer | 0.20 | 0.22 | 0.20 | 0.22 |
| Luvigel ® EM | 1.50 | 2.50 | 2.80 | 3.50 |
| Xanthan Gum | 0.10 | 0.13 | 0.10 | 0.13 |
| Cetearyl Alcohol | 3.00 | 2.50 | 3.00 | 2.50 |
| C12-15 Alkyl benzoate | 4.00 | 4.50 | 4.00 | 4.50 |
| Caprylic/Capric Triglyceride | 3.00 | 3.50 | 3.00 | 3.50 |
| Titanium Dioxide-microfine | 1.00 | | 1.50 | |
| Zinc Oxide-microfine | | 2.00 | | 0.25 |
| Keratin-binding domain-reactive | 0.5 | 10.0 | 3.0 | 5.0 |
| dye 14_264 | | | | |
| Dihydroxyacetone | | | 3.00 | 5.00 |
| Cyclomethicone | 5.00 | 5.50 | 5.00 | 5.50 |
| Dimethicone | 1.00 | 0.60 | 1.00 | 0.60 |
| Glycerin | 1.00 | 1.20 | 1.00 | 1.20 |
| Sodium Hydroxide | q.s. | q.s. | q.s. | q.s. |
| Preservative | 0.30 | 0.23 | 0.30 | 0.23 |
| Perfume oil | 0.20 | | 0.20 | |
| Aqua dem. | ad 100 | ad 100 | ad 100 | ad 100 |

adjust pH to 6.0

[0713] OW Self-Tanning Formulation

| | 1 | 2 | 3 | 4 | 5 | 6 | 7 |
|---|---|---|---|---|---|---|---|
| Glyceryl Monostearate SE | 0.50 | 1.00 | 3.00 | | | 1.50 | |
| Glyceryl Stearate Citrate | 2.00 | | 1.00 | 2.00 | 4.00 | | |
| Stearic Acid | | 3.00 | | 2.00 | | | |
| PEG-40 Stearate | 0.50 | | | | | 2.00 | |
| Cetyl Phosphate | | | | | | 1.00 | |
| Cetearyl Sulfate | | | | | | | 0.75 |
| Stearyl Alcohol | | | 3.00 | | | 2.00 | 0.60 |
| Cetyl Alcohol | 2.50 | 1.10 | | 1.50 | 0.60 | | 2.00 |
| Keratin-binding domain- | 0.1 | 0.5 | 0.025 | 5.0 | 3.0 | 10.0 | 1.0 |
| reactive dye 14_264 | | | | | | | |
| Dihydroxyacetone | | | 3.00 | 5.00 | | 4 | |
| Titanium Dioxide-microfine | 1.00 | | | | 1.50 | | 1.50 |
| Zinc Oxide-microfine | | | | 0.25 | | 2.00 | |
| C12-15 Alkyl Benzoate | | 0.25 | | | 4.00 | 7.00 | |
| Dicaprylyl Ether | | | 3.50 | | 2.00 | | |
| Butylene Glycol | 5.00 | | 6.00 | | | | |
| Dicaprylate/Dicaprate | | | | | | | |
| Cocoglycerides | | | 6.00 | | 2.00 | | |
| Dimethicone | 0.50 | | 1.00 | | 2.00 | | |
| Cyclomethicone | 2.00 | | 0.50 | | 0.50 | | |
| Butyrospermum Parkii (Shea | | 2.00 | | | | | |
| Butter) | | | | | | | |
| VP/Hexadecene Copolymer | 0.20 | | | 0.50 | | 1.00 | |
| Glycerin | 3.00 | 7.50 | | 7.50 | 5.00 | | 2.50 |
| Xanthan Gum | 0.15 | | 0.05 | | | 0.30 | |
| Sodium Carbomer | | 0.20 | | 0.15 | 0.25 | | |
| Vitamin E Acetate | 0.60 | | 0.23 | | 0.70 | 1.00 | |
| Biosaccharide Gum-1 | | 3.00 | 10.00 | | | | |
| Glycine Soja (Soybean) Oil | | | | 0.50 | | 1.50 | 1.00 |
| Ethylhexylglycerin | 0.30 | | | | | | |
| DMDM Hydantoin | | 0.60 | 0.40 | 0.20 | | | |
| Iodopropynyl Butylcarbamate | | | | 0.18 | 0.20 | | |
| Methylparaben | 0.15 | | 0.25 | | 0.50 | | |
| Phenoxyethanol | 1.00 | 0.40 | | | 0.40 | 0.50 | 0.40 |
| Trisodium EDTA | 0.02 | | 0.05 | | | | |
| Tetrasodium | | | | 0.25 | 1.00 | | |
| Iminodisuccinate | | | | | | | |
| Ethanol | 2.00 | 1.50 | | 3.00 | | 1.20 | 5.00 |
| Perfume oil | 0.10 | 0.25 | 0.30 | | 0.40 | 0.20 | |
| Aqua dem. | ad 100 | ad 100 | ad 100 | ad 100 | ad 100 | ad 100 | ad 100 |

[0714] OW Make Up

| | 1 | 2 | 3 | 4 | 5 | 6 | 7 |
|---|---|---|---|---|---|---|---|
| Glyceryl Monostearate SE | 0.50 | 1.00 | 3.00 | | | 1.50 | |
| Glyceryl Stearate Citrate | 2.00 | | 1.00 | 2.00 | 4.00 | | |
| Stearic Acid | | 3.00 | | 2.00 | | | |
| PEG-40 Stearate | 0.50 | | | | | 2.00 | |
| Cetyl Phosphate | | | | | | 1.00 | |
| Cetearyl Sulfate | | | | | | | 0.75 |
| Stearyl Alcohol | | | 3.00 | | | 2.00 | 0.60 |
| Cetyl Alcohol | 2.50 | 1.10 | | 1.50 | 0.60 | | 2.00 |
| Keratin binding domain- | 3.0 | 5.0 | 2.0 | 0.5 | 1.0 | 5.0 | 10.0 |
| reactive dye 14_264 | | | | | | | |
| Titanium Dioxide | 10.00 | 12.00 | 9.00 | 8.50 | 11.00 | 9.50 | 10.00 |
| Iron Oxide | 2.00 | — | 3.00 | 5.00 | 0.2 | 6.00 | 4.40 |
| Zinc Oxide | | — | | 2.00 | | 3.00 | |
| C12-15 Alkyl Benzoate | | 0.25 | | | 4.00 | 7.00 | |
| Dicaprylyl Ether | | | 3.50 | | 2.00 | | |
| Butylene Glycol | 5.00 | | 6.00 | | | | |
| Dicaprylate/Dicaprate | | | | | | | |
| Cocoglycerides | | | 6.00 | | 2.00 | | |
| Dimethicone | 0.50 | | 1.00 | | 2.00 | | |
| Cyclomethicone | 2.00 | | 0.50 | | 0.50 | | |
| Butyrospermum Parkii (Shea | | 2.00 | | | | | |
| Butter) | | | | | | | |
| VP/Hexadecene Copolymer | 0.20 | | | 0.50 | | 1.00 | |
| Glycerin | 3.00 | 7.50 | | 7.50 | 5.00 | | 2.50 |
| Xanthan Gum | 0.15 | | 0.05 | | | 0.30 | |
| Sodium Carbomer | | 0.20 | | 0.15 | 0.25 | | |
| Vitamin E Acetate | 0.60 | | 0.23 | | 0.70 | 1.00 | |
| Glycine Soja (Soybean) Oil | | | | 0.50 | | 1.50 | 1.00 |
| Ethylhexylglycerin | 0.30 | | | | | | |
| DMDM Hydantoin | | 0.60 | 0.40 | 0.20 | | | |
| Iodopropynyl Butylcarbamate | | | | 0.18 | 0.20 | | |
| Methylparaben | 0.15 | | 0.25 | | 0.50 | | |
| Phenoxyethanol | 1.00 | 0.40 | | | 0.40 | 0.50 | 0.40 |
| Trisodium EDTA | 0.02 | | 0.05 | | | | |
| Tetrasodium | | | | 0.25 | 1.00 | | |
| Iminodisuccinate | | | | | | | |
| Ethanol | 2.00 | 1.50 | | 3.00 | | 1.20 | 5.00 |
| Perfume oil | 0.10 | 0.25 | 0.30 | | 0.40 | 0.20 | |
| Aqua dem. | ad 100 | ad 100 | ad 100 | ad 100 | ad 100 | ad 100 | ad 100 |

[0715] Self-Tanning Hydrodispersion with Tinting Effect

| | 1 | 2 | 3 | 4 | 5 |
|---|---|---|---|---|---|
| Ceteaereth-20 | 1.00 | | | 0.50 | |
| Cetyl Alcohol | | | 1.00 | | |
| Luvigel ® EM | | 2.00 | | 2.50 | 2.00 |
| Acrylates/C10-30 Alkyl Acrylate | 0.50 | | 0.40 | 0.10 | 0.50 |
| Crosspolymer | | | | | |
| Xanthan Gum | | 0.30 | 0.15 | | |
| Keratin-binding domain-reactive dye | 3.0 | 1.0 | 0.5 | 0.1 | 5.0 |
| 14_264 | | | | | |
| Dihydroxyacetone | | | 3.00 | 5.00 | |
| Titanium Dioxide-microfine | 1.00 | | 1.00 | | 1.00 |
| Zinc Oxide-microfine | | 1.90 | | 0.25 | |
| C12-15 Alkyl Benzoate | 2.00 | 2.50 | | | |
| Dicaprylyl Ether | | 4.00 | | | |
| Butylene Glycol Dicaprylate/Dicaprate | 4.00 | | 2.00 | 6.00 | |
| Dicaprylyl Carbonate | | 2.00 | 6.00 | | |
| Dimethicone | | 0.50 | 1.00 | | |
| Phenyl Trimethicone | 2.00 | | 0.50 | | |
| Butyrospermum Parkii (Shea Butter) | | 2.00 | | 5.00 | |
| VP/Hexadecene Copolymer | 0.50 | | | 0.50 | 1.00 |
| Tricontanyl PVP | 0.50 | | 1.00 | | |
| Ethylhexylglycerin | | | 1.00 | | 0.80 |
| Glycerin | 3.00 | 7.50 | | 7.50 | 8.50 |
| Glycine Soja (Soybean) Oil | | | 1.50 | | 1.00 |
| Vitamin E Acetate | 0.50 | | 0.25 | | 1.00 |
| Glucosylrutin | 0.60 | | | 0.25 | |
| DMDM Hydantoin | | 0.60 | 0.45 | 0.25 | |
| Iodopropynyl Butylcarbamate | 0.20 | | | | |
| Methylparaben | 0.50 | | 0.25 | 0.15 | |
| Phenoxyethanol | 0.50 | 0.40 | | 1.00 | |
| Trisodium EDTA | | 0.01 | 0.05 | | 0.10 |
| Ethanol | 3.00 | 2.00 | 1.50 | | 7.00 |
| Perfume oil | 0.20 | | 0.05 | 0.40 | |
| Aqua dem. | ad 100 | ad 100 | ad 100 | ad 100 | ad 100 |

[0716] After-Sun Hydrodispersion

| | 1 | 2 | 3 | 4 | 5 |
|---|---|---|---|---|---|
| Ceteaereth-20 | 1.00 | | | 0.50 | |
| Cetyl Alcohol | | | 1.00 | | |
| Luvigel ® EM | | 2.00 | | 2.50 | 2.00 |
| Acrylates/C10-30 Alkyl Acrylate | 0.50 | 0.30 | 0.40 | 0.10 | 0.50 |
| Crosspolymer | | | | | |
| Xanthan Gum | | 0.30 | 0.15 | | |
| Keratin-binding domain-reactive dye | 0.1 | 5.0 | 0.5 | 3.0 | 10.0 |
| 14_264 | | | | | |
| C12-15 Alkyl Benzoate | 2.00 | 2.50 | | | |
| Dicaprylyl Ether | | 4.00 | | | |
| Butylene Glycol Dicaprylate/Dicaprate | 4.00 | | 2.00 | 6.00 | |
| Dicaprylyl Carbonate | | 2.00 | 6.00 | | |
| Dimethicone | | 0.50 | 1.00 | | |
| Phenyl Trimethicone | 2.00 | | 0.50 | | |
| Tricontanyl PVP | 0.50 | | 1.00 | | |
| Ethylhexylglycerin | | | 1.00 | | 0.80 |
| Glycerin | 3.00 | 7.50 | | 7.50 | 8.50 |
| Glycine Soja (Soybean) Oil | | | 1.50 | | 1.00 |
| Vitamin E Acetate | 0.50 | | 0.25 | | 1.00 |
| Glucosylrutin | 0.60 | | | 0.25 | |
| Trisodium EDTA | | 0.01 | 0.05 | | 0.10 |
| Ethanol | 15.00 | 10.00 | 8.00 | 12.00 | 9.00 |
| Perfume oil | 0.20 | | 0.05 | 0.40 | |
| Aqua dem. | ad 100 | ad 100 | ad 100 | ad 100 | ad 100 |

[0717] WO Emulsion

| | 1 | 2 | 3 | 4 | 5 |
|---|---|---|---|---|---|
| Cetyl Dimethicone | | 2.50 | | 4.00 | |
| Polyglyceryl-2 Dipolyhydroxystearate | 5.00 | | | | 4.50 |
| PEG-30 Dipolyhydroxystearate | | | 5.00 | | |
| Keratin-binding domain-reactive dye 14_264 | 7.0 | 12.0 | 0.1 | 0.5 | 1.0 |
| Titanium Dioxide-microfine | 1.00 | | 3.00 | | 3.50 |
| Zinc Oxide-microfine | | 0.90 | | 0.25 | |
| Mineral Oil | | 12.00 | 10.00 | | 8.00 |
| C12-15 Alkyl Benzoate | | | | 9.00 | |
| Dicaprylyl Ether | 10.00 | | | | 7.00 |
| Butylene Glycol Dicaprylate/Dicaprate | | | 2.00 | 8.00 | 4.00 |
| Dicaprylyl Carbonate | 5.00 | | 6.00 | | |
| Dimethicone | | 4.00 | 1.00 | 5.00 | |
| Cyclomethicone | 2.00 | 25.00 | | | 2.00 |
| Butyrospermum Parkii (Shea Butter) | | | 3.00 | | |
| Petrolatum | | 4.50 | | | |
| VP/Hexadecene Copolymer | 0.50 | | | 0.50 | 1.00 |
| Ethylhexylglycerin | | 0.30 | 1.00 | | 0.50 |
| Glycerin | 3.00 | 7.50 | | 7.50 | 8.50 |
| Glycine Soja (Soybean) Oil | | 1.00 | 1.50 | | 1.00 |
| Magnesium Sulfate | 1.00 | 0.50 | | 0.50 | |
| Magnesium Chloride | | | 1.00 | | 0.70 |
| Vitamin E Acetate | 0.50 | | 0.25 | | 1.00 |
| Ascorbyl Palmitate | 0.50 | | | 2.00 | |
| Biosaccharide Gum-1 | | | | 3.50 | 7.00 |
| DMDM Hydantoin | | 0.60 | 0.40 | 0.20 | |
| Methylparaben | 0.50 | | 0.25 | 0.15 | |
| Phenoxyethanol | 0.50 | 0.40 | | 1.00 | |
| Trisodium EDTA | 0.12 | 0.05 | | 0.30 | |
| Ethanol | 3.00 | | 1.50 | | 5.00 |
| Perfume oil | 0.20 | | 0.40 | 0.35 | |
| Aqua dem. | ad 100 | ad 100 | ad 100 | ad 100 | ad 100 |

[0718] Solids-Stabilized Emulsion (Pickering Emulsions)

| | 1 | 2 | 3 | 4 | 5 |
|---|---|---|---|---|---|
| Mineral Oil | | | 16.00 | 16.00 | |
| Octyldodecanol | 9.00 | 9.00 | 5.00 | | |
| Caprylic/Capric Triglyceride | 9.00 | 9.00 | 6.00 | | |
| C12-15 Alkyl Benzoate | | | | 5.00 | 8.00 |
| Butylene Glycol Dicaprylate/Dicaprate | | | | | 8.00 |
| Dicaprylyl Ether | 9.00 | | | 4.00 | |
| Dicaprylyl Carbonate | | 9.00 | | | |
| Hydroxyoctacosanyl Hydroxystearate | 2.00 | 2.00 | 2.20 | 2.50 | 1.50 |
| Disteardimonium Hectorite | 1.00 | 0.75 | | 0.50 | 0.25 |
| Cera Microcristalline + Paraffinum Liquidum | | 0.35 | | | 5.00 |
| Hydroxypropyl Methylcellulose | | | 0.10 | | 0.05 |
| Dimethicone | | | | | 3.00 |
| Keratin-binding domain-reactive dye 14_264 | 1.0 | 15.0 | 0.1 | 3.0 | 5.0 |
| Titanium Dioxide + Alumina + Simethicone + | | 3.00 | | | |
| Aqua | | | | | |
| Titanium Dioxide + Trimethoxycaprylylsilane | | 2.00 | 4.00 | 2.00 | 4.00 |
| Silica Dimethyl Silylate | 2.50 | | | 6.00 | 2.50 |
| Boron Nitride | | | 1.00 | | |
| Starch/Sodium Metaphosphate Polymer | 2.00 | | | | |
| Tapioca Starch | | 0.50 | | | |
| Sodium Chloride | 5.00 | 7.00 | 8.50 | 3.00 | 4.50 |
| Glycerin | | | | 1.00 | |
| Trisodium EDTA | 1.00 | 1.00 | 1.00 | 1.00 | 1.00 |
| Vitamin E Acetate | 5.00 | 10.00 | 3.00 | 6.00 | 10.00 |
| Ascorbyl Palmitate | 1.00 | 1.00 | | 1.00 | |
| Methylparaben | | 0.60 | | | 0.20 |
| Propylparaben | | | | | 0.20 |
| Phenoxyethanol | | | 0.20 | | |
| Hexamidine Diisethionate | | | 0.40 | 0.50 | 0.40 |
| Diazolidinyl Urea | | | | | 0.08 |
| Ethanol | | | 0.23 | 0.20 | |
| Perfume oil | 5.00 | | 3.00 | 4.00 | |
| Aqua dem. | 0.20 | | 0.30 | 0.10 | |
| | ad 100 | ad 100 | ad 100 | ad 100 | ad 100 |

[0719] Sticks

| | 1 | 2 | 3 | 4 |
|---|---|---|---|---|
| Caprylic/Capric Triglyceride | 12.00 | 10.00 | 6.00 | |
| Octyldodecanol | 7.00 | 14.00 | 8.00 | 3.00 |
| Butylene Glycol | | | | 12.00 |
| Dicaprylate/Dicaprate | | | | |
| Pentaerythrityl Tetraisostearate | 10.00 | 6.00 | 8.00 | 7.00 |
| Polyglyceryl-3 Diisostearate | 2.50 | | | |
| Bis-Diglyceryl Polyacyladipate-2 | 9.00 | 8.00 | 10.00 | 8.00 |
| Cetearyl Alcohol | 8.00 | 11.00 | 9.00 | 7.00 |
| Myristyl Myristate | 3.50 | 3.00 | 4.00 | 3.00 |
| Beeswax | 5.00 | 5.00 | 6.00 | 6.00 |
| Copernicia Cerifera (Carnauba) | 1.50 | 2.00 | 2.00 | 1.50 |
| Wax | | | | |
| Cera Alba | 0.50 | 0.50 | 0.50 | 0.40 |
| C16-40 Alkyl Stearate | | 1.50 | 1.50 | 1.50 |
| Keratin-binding domain-reactive | 10.0 | 1.0 | 3.0 | 0.1 |
| dye 14_264 | | | | |
| Uvinul ® A Plus ™ | 2.00 | 1.50 | 0.75 | 9.00 |
| Titanium Dioxide-microfine | 1.00 | | 3.00 | |
| Zinc Oxide-microfine | | 1.00 | | 0.25 |
| Vitamin E Acetate | 0.50 | 1.00 | | |
| Ascorbyl Palmitate | 0.05 | | 0.05 | |
| Buxux Chinensis (Jojoba) Oil | 2.00 | 1.00 | | 1.00 |
| Perfume oil, BHT | 0.10 | 0.25 | | 0.35 |
| Ricinus Communis (Castor) Oil | ad 100 | ad 100 | ad 100 | ad 100 |

[0720] Self-Tanning PIT Emulsions

| | 1 | 2 | 3 | 4 | 5 | 6 | 7 | 8 |
|---|---|---|---|---|---|---|---|---|
| Glyceryl Monostearate SE | 0.50 | 2.00 | 3.00 | 5.00 | | 0.50 | 4.00 | |
| Glyceryl Isostearate | | | | | 3.50 | 4.00 | 2.00 | |
| Isoceteth-20 | | 0.50 | | | 2.00 | | | |
| Ceteareth-12 | | 5.00 | | 1.00 | | | 3.50 | 5.00 |
| Ceteareth-20 | | 5.00 | | 1.00 | | | | 3.50 |
| PEG-100 Stearate | | | | 2.80 | | 2.30 | 3.30 | |
| Cetyl Alcohol | 5.20 | | 1.20 | 1.00 | 1.30 | | 0.50 | 0.30 |
| Cetyl Palmitate | 2.50 | 1.20 | | 1.50 | | 0.50 | | 1.50 |
| Cetyl Dimethicone Copolyol | | | | 0.50 | | 1.00 | | |
| Polyglyceryl-2 | | | | 0.75 | 0.30 | | | |
| Keratin-binding domain-reactive | 0.1 | 0.5 | 0.01 | 5.0 | 0.5 | 3.0 | 0.025 | 10.0 |
| dye 14_264 | | | | | | | | |
| Dihydroxyacetone | | | 3.00 | 5.00 | | | 4.00 | |
| Titanium Dioxide-microfine | 1.00 | | 1.50 | | 3.50 | | 1.50 | 1.00 |
| Zinc Oxide-microfine | | 1.00 | | 0.25 | | 2.00 | | 1.50 |
| C12-15 Alkyl Benzoate | 3.50 | | | 6.35 | | | | 0.10 |
| Cocoglycerides | | 3.00 | | 3.00 | | | | 1.00 |
| Dicaprylyl Ether | 4.50 | | | | | | | |
| Dicaprylyl Carbonate | | 4.30 | | 3.00 | | | | 7.00 |
| Dibutyl Adipate | | | | 0.50 | | | | 0.30 |
| Phenyl Trimethicone | 2.00 | | | 3.50 | | 2.00 | | |
| Cyclomethicone | | 3.00 | | | | | | |
| C1-5 Alkyl Galactomannan | | 0.50 | | | 2.00 | | | |
| Hydrogenated Cocoglycerides | | | | | 3.00 | 4.00 | | |
| Behenoxy Dimethicone | | | | | | 1.50 | 2.00 | |
| VP/Hexadecene Copolymer | | | | 1.00 | 1.20 | | | |
| Glycerin | 4.00 | 6.00 | 5.00 | | 8.00 | 10.00 | | |
| Vitamin E Acetate | 0.20 | 0.30 | 0.40 | | 0.30 | | | |
| Butyrospermum Parkii (Shea | | 2.00 | | 3.60 | | 2.00 | | |
| Butter) | | | | | | | | |
| Iodopropyl Butylcarbamate | 0.12 | | | | 0.20 | | | |
| DMDM Hydantoin | 0.10 | | | | 0.12 | | 0.13 | |
| Methylparaben | | 0.50 | 0.30 | | 0.35 | | | |
| Phenoxyethanol | 0.50 | 0.40 | | 1.00 | | | | |
| Ethylhexylglycerin | | 0.30 | | | 1.00 | | 0.35 | |
| Ethanol | 2.00 | | 2.00 | | | 5.00 | | |
| Trisodium EDTA | 0.40 | | 0.15 | | | 0.20 | | |
| Perfume oil | 0.20 | | 0.20 | | 0.24 | 0.16 | 0.10 | 0.10 |
| Aqua dem. | ad 100 | ad 100 | ad 100 | ad 100 | ad 100 | ad 100 | ad 100 | ad 100 |

[0721] Oil Gel

| | 1 | 2 | 3 | 4 |
|---|---|---|---|---|
| Caprylic/Capric Triglyceride | 12.00 | 10.00 | 6.00 | |
| Octyldodecanol | 7.00 | 14.00 | 8.00 | 3.00 |
| Butylene Glycol | | | | 12.00 |
| Dicaprylate/Dicaprate | | | | |
| Pentaerythrityl Tetraisostearate | 10.00 | 6.00 | 8.00 | 7.00 |
| Polyglyceryl-3 Diisostearate | 2.50 | | | |
| Bis-Diglyceryl Polyacyladipate-2 | 9.00 | 8.00 | 10.00 | 8.00 |
| Myristyl Myristate | 3.50 | 3.00 | 4.00 | 3.00 |
| Quaternium-18 Bentonite | 5.00 | 5.00 | 6.00 | 6.00 |
| Propylene Carbonate | 15.00 | 20.00 | 18.00 | 19.50 |
| Keratin-binding domain-reactive | 1.0 | 0.5 | 3.0 | 5.0 |
| dye 14_264 | | | | |
| Vitamin E Acetate | 0.50 | 1.00 | | |
| Ascorbyl Palmitate | 0.05 | | 0.05 | |
| Buxus Chinensis (Jojoba) Oil | 2.00 | 1.00 | | 1.00 |
| Perfume oil, BHT | 0.10 | 0.25 | | 0.35 |
| Ricinus Communis (Castor) Oil | ad 100 | ad 100 | ad 100 | ad 100 |

### Example 108

[0722] In the following formulations, cosmetic sunscreen preparations comprising a combination of at least one inorganic pigment, preferably zinc oxide and/or titanium oxide, Uvinul A Plus and further organic UV-A and UV-B tilters are described.

[0723] The inorganic pigments here may be present in coated form, i.e. that they are treated superficially. This surface treatment can, for example, consist in providing the pigments with a thin hydrophobic layer by a method known per se, as described in DE-A-33 14 742.

[0724] The formulations given below are prepared in a customary way known to the person skilled in the art.

[0725] Dermocosmetic preparations according to the invention are described below comprising the keratin-binding effector molecule prepared according to Example 19 (keratin-binding domain according to SEQ ID No.: ID 168 coupled with the dye 14_{—}264). Said keratin-binding effector molecule is referred to in the examples below as keratin-binding domain-reactive dye 14_{—}264. It goes without saying for the person skilled in the art that all of the other dyes described in Tables 6 and 7 can also be coupled with the KBD according to Example 19, 19 a or 19 b and can be used in the preparations given below.

[0726] The content of keratin-binding domain-reactive dye 14_{—}264 KBD-D (SEQ ID No.: 168) refers to 100% of active ingredient. The active ingredient according to the invention can be used either in pure form or as an aqueous solution. In the case of aqueous solution, the content of water dem. in the particular formulation must be adjusted.

| | | | |
|---|---|---|---|
| A | 7.50 | Uvinul ® MC 80 | Ethylhexyl Methoxycinnamate |
| | 2.00 | Uvinul ® M 40 | Benzophenone-3 |
| | 0.80 | Rylo PG 11 | Polyglyceryl Dimer Soyate |
| | 1.00 | Span ™ 60 | Sorbitan Stearate |
| | 0.50 | Vitamin E Acetate | Tocopheryl Acetate |
| | 3.00 | Dracorin ® 100 SE | Glyceryl Stearate, PEG-100 Stearate |
| | 1.00 | Cremophor ® CO 410 | PEG-40 Hydrogenated Castor Oil |
| B | 3.00 | T-Lite ® SF | Titanium Dioxide, Alumina Hydrate, |
| | | | Dimethicone/Methicone Copolymer |
| | 1.00 | Cetiol ® SB 45 | Butyrospermum Parkii (Shea Butter) |
| | 6.50 | Finsolv ® TN | C12-15 Alkyl Benzoate |
| C | 5.00 | Butylene Glycol | Butylene Glycol |
| | 0.30 | Keltrol ® | Xanthan Gum |
| | 0.10 | Edeta BD | Disodium EDTA |
| | 0.10 | Allantoin | Allantoin |
| | 66.20 | Water demin. | Aqua dem. |
| D | 1.00 | Sepigel 305 | Polyacrylamide, C13-14 Isoparaffin, Laureth-7 |
| | 1.00 | Keratin-binding domain- | |
| | | reactive dye 14_264 | |
| | q.s. | Preservative | |
| A | 7.50 | Uvinul ® MC 80 | Ethylhexyl Methoxycinnamate |
| | 2.00 | Uvinul ® M 40 | Benzophenone-3 |
| | 0.80 | Rylo PG 11 | Polyglyceryl Dimer Soyate |
| | 1.00 | Span ™ 60 | Sorbitan Stearate |
| | 0.50 | Vitamin E Acetate | Tocopheryl Acetate |
| | 3.00 | Dracorin 100 SE | Glyceryl Stearate, PEG-100 Stearate |
| | 1.00 | Cremophor ® CO 410 | PEG-40 Hydrogenated Castor Oil |
| B | 3.00 | Z-COTE ® MAX | Zinc Oxide, Diphenyl Capryl Methicone |
| | 1.00 | Cetiol ® SB 45 | Butyrospermum Parkii (Shea Butter) |
| | 6.50 | Finsolv TN | C12-15 Alkyl Benzoate |
| C | 5.00 | Butylene Glycol | Butylene Glycol |
| | 0.30 | Keltrol | Xanthan Gum |
| | 0.10 | Edeta BD | Disodium EDTA |
| | 0.10 | Allantoin | Allantoin |
| | 66.20 | Water demin. | Aqua dem. |
| D | 2.00 | Simulgel NS | Hydroxyethyl Acrylate/Sodium |
| | | | Acryloyldimethyl Taurate Copolymer, |
| | | | Squalane, Polysorbate 60 |
| | 1.00 | Keratin-binding domain- | |
| | | reactive dye 14_264 | |
| | q.s. | Preservative | |
| A | 7.50 | Uvinul ® MC 80 | Ethylhexyl Methoxycinnamate |
| | 2.00 | Uvinul ® A Plus | Diethylamino Hydroxybenzoyl Hexyl Benzoate |
| | 0.80 | Rylo PG 11 | Polyglyceryl Dimer Soyate |
| | 1.00 | Span ™ 60 | Sorbitan Stearate |
| | 0.50 | Vitamin E Acetate | Tocopheryl Acetate |
| | 3.00 | Dracorin ® 100 SE | Glyceryl Stearate, PEG-100 Stearate |
| | 1.00 | Cremophor ® CO 410 | PEG-40 Hydrogenated Castor Oil |
| B | 3.00 | Z-COTE ® MAX | Zinc Oxide, Diphenyl Capryl Methicone |
| | 1.00 | Cetiol ® SB 45 | Butyrospermum Parkii (Shea Butter) |
| | 6.50 | Finsolv ® TN | C12-15 Alkyl Benzoate |
| C | 5.00 | Butylene Glycol | Butylene Glycol |
| | 0.30 | Keltrol ® | Xanthan Gum |
| | 0.10 | Edeta BD | Disodium EDTA |
| | 0.10 | Allantoin | Allantoin |
| | 66.20 | Water demin. | Aqua dem. |
| D | 2.00 | Simulgel ® NS | Hydroxyethyl Acrylate/Sodium |
| | | | Acryloyldimethyl Taurate Copolymer, |
| | | | Squalane, Polysorbate 60 |
| | 1.00 | Keratin-binding domain- | |
| | | reactive dye 14_264 | |
| | q.s. | Preservative | |
| A | 4.00 | Uvinul ® MC 80 | Ethylhexyl Methoxycinnamate |
| | 2.00 | Uvinul ® T 150 | Ethylhexyl Triazone |
| | 2.00 | Uvinul ® A Plus | Diethylamino Hydroxybenzoyl Hexyl Benzoate |
| | 0.80 | Rylo PG 11 | Polyglyceryl Dimer Soyate |
| | 1.00 | Span ™ 60 | Sorbitan Stearate |
| | 0.50 | Vitamin E Acetate | Tocopheryl Acetate |
| | 3.00 | Dracorin ® 100 SE | Glyceryl Stearate, PEG-100 Stearate |
| | 1.00 | Cremophor ® CO 410 | PEG-40 Hydrogenated Castor Oil |
| B | 3.00 | Z-COTE ® MAX | Zinc Oxide, Diphenyl Capryl Methicone |
| | 1.00 | Cetiol ® SB 45 | Butyrospermum Parkii (Shea Butter) |
| | 6.50 | Finsolv ® TN | C12-15 Alkyl Benzoate |
| C | 5.00 | Butylene Glycol | Butylene Glycol |
| | 0.30 | Keltrol ® | Xanthan Gum |
| | 0.10 | Edeta BD | Disodium EDTA |
| | 0.10 | Allantoin | Allantoin |
| | 66.20 | Water demin. | Aqua dem. |
| D | 2.00 | Simulgel ® NS | Hydroxyethyl Acrylate/Sodium |
| | | | Acryloyldimethyl Taurate Copolymer, |
| | | | Squalane, Polysorbate 60 |
| | 1.00 | Keratin-binding domain- | |
| | | reactive dye 14_264 | |
| | q.s. | Preservative | |
| A | 4.00 | Uvinul ® MC 80 | Ethylhexyl Methoxycinnamate |
| | 2.00 | Uvinul ® T 150 | Ethylhexyl Triazone |
| | 2.00 | Uvinul ® A Plus | Diethylamino Hydroxybenzoyl Hexyl Benzoate |
| | 0.80 | Rylo PG 11 | Polyglyceryl Dimer Soyate |
| | 1.00 | Span ™ 60 | Sorbitan Stearate |
| | 0.50 | Vitamin E Acetate | Tocopheryl Acetate |
| | 3.00 | Dracorin ® 100 SE | Glyceryl Stearate, PEG-100 Stearate |
| | 1.00 | Cremophor ® CO 410 | PEG-40 Hydrogenated Castor Oil |
| B | 3.00 | T-Lite ® SF | Titanium Dioxide, Alumina Hydrate, |
| | | | Dimethicone/Methicone Copolymer |
| | 1.00 | Cetiol ® SB 45 | Butyrospermum Parkii (Shea Butter) |
| | 6.50 | Finsolv ® TN | C12-15 Alkyl Benzoate |
| C | 5.00 | Butylene Glycol | Butylene Glycol |
| | 0.30 | Keltrol ® | Xanthan Gum |
| | 0.10 | Edeta BD | Disodium EDTA |
| | 0.10 | Allantoin | Allantoin |
| | 66.20 | Water demin. | Aqua dem. |
| D | 2.00 | Simulgel ® NS | Hydroxyethyl Acrylate/Sodium |
| | | | Acryloyldimethyl Taurate Copolymer, |
| | | | Squalane, Polysorbate 60 |
| | 1.00 | Keratin-binding domain- | |
| | | reactive dye 14_264 | |
| | q.s. | Preservative | |
| A | 4.00 | Uvinul ® MC 80 | Ethylhexyl Methoxycinnamate |
| | 2.00 | Uvinul T ® 150 | Ethylhexyl Triazone |
| | 2.00 | Uvinul ® A Plus | Diethylamino Hydroxybenzoyl Hexyl Benzoate |
| | 0.80 | Rylo PG 11 | Polyglyceryl Dimer Soyate |
| | 1.00 | Span ™ 60 | Sorbitan Stearate |
| | 0.50 | Vitamin E Acetate | Tocopheryl Acetate |
| | 3.00 | Dracorin ® 100 SE | Glyceryl Stearate, PEG-100 Stearate |
| | 1.00 | Cremophor ® CO 410 | PEG-40 Hydrogenated Castor Oil |
| B | 3.00 | Z-COTE ® MAX | Zinc Oxide, Diphenyl Capryl Methicone |
| | 1.00 | Cetiol ® SB 45 | Butyrospermum Parkii (Shea Butter) |
| | 6.50 | Finsolv ® TN | C12-15 Alkyl Benzoate |
| C | 5.00 | Butylene Glycol | Butylene Glycol |
| | 0.30 | Keltrol ® | Xanthan Gum |
| | 0.10 | Edeta BD | Disodium EDTA |
| | 0.10 | Allantoin | Allantoin |
| | 66.20 | Water demin. | Aqua dem. |
| D | 2.00 | Simulgel ® NS | Hydroxyethyl Acrylate/Sodium |
| | | | Acryloyldimethyl Taurate Copolymer, |
| | | | Squalane, Polysorbate 60 |
| | 1.00 | Keratin-binding domain- | |
| | | reactive dye 14_264 | |
| | q.s. | Preservative | |
| A | 4.00 | Uvinul ® MC 80 | Ethylhexyl Methoxycinnamate |
| | 1.00 | Uvinul ® T 150 | Ethylhexyl Triazone |
| | 2.00 | Parsol ® 1789 | Butyl Methoxydibenzoylmethane |
| | 0.80 | Rylo PG 11 | Polyglyceryl Dimer Soyate |
| | 1.00 | Span ™ 60 | Sorbitan Stearate |
| | 0.50 | Vitamin E Acetate | Tocopheryl Acetate |
| | 3.00 | Dracorin ® 100 SE | Glyceryl Stearate, PEG-100 Stearate |
| | 1.00 | Cremophor ® CO 410 | PEG-40 Hydrogenated Castor Oil |
| B | 3.00 | T-Lite ® SF-S | Titanium Dioxide, Silica Hydrate, Alumina |
| | | | Hydrate, Methicone/Dimethicone Copolymer |
| | 1.00 | Cetiol ® SB 45 | Butyrospermum Parkii (Shea Butter) |
| | 6.50 | Finsolv ® TN | C12-15 Alkyl Benzoate |
| C | 5.00 | Butylene Glycol | Butylene Glycol |
| | 0.30 | Keltrol ® | Xanthan Gum |
| | 0.10 | Edeta BD | Disodium EDTA |
| | 0.10 | Allantoin | Allantoin |
| | 66.70 | Water demin. | Aqua dem. |
| D | 2.00 | Simulgel ® NS | Hydroxyethyl Acrylate/Sodium |
| | | | Acryloyldimethyl Taurate Copolymer, |
| | | | Squalane, Polysorbate 60 |
| | 0.50 | Keratin-binding domain- | |
| | | reactive dye 14_264 | |
| | q.s. | Preservative | |
| A | 4.00 | Uvinul ® MC 80 | Ethylhexyl Methoxycinnamate |
| | 1.00 | Uvinul ® T 150 | Ethylhexyl Triazone |
| | 2.00 | Parsol ® 1789 | Butyl Methoxydibenzoylmethane |
| | 0.80 | Rylo PG 11 | Polyglyceryl Dimer Soyate |
| | 1.00 | Span ™ 60 | Sorbitan Stearate |
| | 0.50 | Vitamin E Acetate | Tocopheryl Acetate |
| | 3.00 | Dracorin ® 100 SE | Glyceryl Stearate, PEG-100 Stearate |
| | 1.00 | Cremophor ® CO 410 | PEG-40 Hydrogenated Castor Oil |
| B | 3.00 | Z-COTE ® MAX | Zinc Oxide, Diphenyl Capryl Methicone |
| | 1.00 | Cetiol ® SB 45 | Butyrospermum Parkii (Shea Butter) |
| | 6.50 | Finsolv ® TN | C12-15 Alkyl Benzoate |
| C | 5.00 | Butylene Glycol | Butylene Glycol |
| | 0.30 | Keltrol ® | Xanthan Gum |
| | 0.10 | Edeta BD | Disodium EDTA |
| | 0.10 | Allantoin | Allantoin |
| | 67.10 | Water demin. | Aqua dem. |
| D | 2.00 | Simulgel NS | Hydroxyethyl Acrylate/Sodium |
| | | | Acryloyldimethyl Taurate Copolymer, |
| | | | Squalane, Polysorbate 60 |
| | 0.10 | Keratin-binding domain- | |
| | | reactive dye 14_264 | |
| | q.s. | Preservative | |
| A | 5.00 | Uvinul ® N 539 T | Octocrylene |
| | 2.00 | Parsol ® 1789 | Butyl Methoxydibenzoylmethane |
| | 0.80 | Rylo PG 11 | Polyglyceryl Dimer Soyate |
| | 1.00 | Span ™ 60 | Sorbitan Stearate |
| | 0.50 | Vitamin E Acetate | Tocopheryl Acetate |
| | 3.00 | Dracorin ® 100 SE | Glyceryl Stearate, PEG-100 Stearate |
| | 1.00 | Cremophor ® CO 410 | PEG-40 Hydrogenated Castor Oil |
| B | 3.00 | T-Lite ® SF-S | Titanium Dioxide, Silica Hydrate, Alumina |
| | | | Hydrate, Methicone/Dimethicone Copolymer |
| | 1.00 | Cetiol ® SB 45 | Butyrospermum Parkii (Shea Butter) |
| | 6.50 | Finsolv ® TN | C12-15 Alkyl Benzoate |
| C | 5.00 | Butylene Glycol | Butylene Glycol |
| | 0.30 | Keltrol ® | Xanthan Gum |
| | 0.10 | Edeta BD | Disodium EDTA |
| | 0.10 | Allantoin | Allantoin |
| | 66.20 | Water demin. | Aqua dem. |
| D | 2.00 | Simulgel ® NS | Hydroxyethyl Acrylate/Sodium |
| | | | Acryloyldimethyl Taurate Copolymer, |
| | | | Squalane, Polysorbate 60 |
| | 1.00 | Keratin-binding domain- | |
| | | reactive dye 14_264 | |
| | q.s. | Preservative | |
| A | 5.00 | Uvinul N ® 539 T | Octocrylene |
| | 2.00 | Uvinul ® A Plus | Diethylamino Hydroxybenzoyl Hexyl Benzoate |
| | 0.80 | Rylo PG 11 | Polyglyceryl Dimer Soyate |
| | 1.00 | Span ™ 60 | Sorbitan Stearate |
| | 0.50 | Vitamin E Acetate | Tocopheryl Acetate |
| | 3.00 | Dracorin ® 100 SE | Glyceryl Stearate, PEG-100 Stearate |
| | 1.00 | Cremophor ® CO 410 | PEG-40 Hydrogenated Castor Oil |
| B | 3.00 | T-Lite ® SF | Titanium Dioxide, Alumina Hydrate, |
| | | | Dimethicone/Methicone Copolymer |
| | 1.00 | Cetiol ® SB 45 | Butyrospermum Parkii (Shea Butter) |
| | 6.50 | Finsolv ® TN | C12-15 Alkyl Benzoate |
| C | 5.00 | Butylene Glycol | Butylene Glycol |
| | 0.30 | Keltrol ® | Xanthan Gum |
| | 0.10 | Edeta BD | Disodium EDTA |
| | 0.10 | Allantoin | Allantoin |
| | 65.20 | Water demin. | Aqua dem. |
| D | 2.00 | Simulgel ® NS | Hydroxyethyl Acrylate/Sodium |
| | | | Acryloyldimethyl Taurate Copolymer, |
| | | | Squalane, Polysorbate 60 |
| | 2.00 | Keratin-binding domain- | |
| | | reactive dye 14_264 | |
| | q.s. | Preservative | |
| A | 5.00 | Uvinul ® N 539 T | Octocrylene |
| | 2.00 | Uvinul ® A Plus | Diethylamino Hydroxybenzoyl Hexyl |
| | | | Benzoate |
| | 0.80 | Rylo PG 11 | Polyglyceryl Dimer Soyate |
| | 1.00 | Span ™ 60 | Sorbitan Stearate |
| | 0.50 | Vitamin E Acetate | Tocopheryl Acetate |
| | 3.00 | Dracorin ® 100 SE | Glyceryl Stearate, PEG-100 Stearate |
| | 1.00 | Cremophor ® CO 410 | PEG-40 Hydrogenated Castor Oil |
| B | 3.00 | Z-COTE ® MAX | Zinc Oxide, Diphenyl Capryl Methicone |
| | 1.00 | Cetiol ® SB 45 | Butyrospermum Parkii (Shea Butter) |
| | 6.50 | Finsolv ® TN | C12-15 Alkyl Benzoate |
| C | 5.00 | Butylene Glycol | Butylene Glycol |
| | 0.30 | Keltrol ® | Xanthan Gum |
| | 0.10 | Edeta BD | Disodium EDTA |
| | 0.10 | Allantoin | Allantoin |
| | 66.70 | Water demin. | Aqua dem. |
| D | 2.00 | Simulgel ® NS | Hydroxyethyl Acrytate/Sodium |
| | | | Acryloyldimethyl Taurate Copolymer, |
| | | | Squalane, Polysorbate 60 |
| | 0.50 | Keratin-binding domain- | |
| | | reactive dye 14_264 | |
| | q.s. | Preservative | |
| A | 5.00 | Uvinul ® N 539 T | Octocrylene |
| | 2.00 | Uvinul ® A Plus | Diethylamino Hydroxybenzoyl Hexyl Benzoate |
| | 0.80 | Rylo PG 11 | Polyglyceryl Dimer Soyate |
| | 1.00 | Span ™ 60 | Sorbitan Stearate |
| | 0.50 | Vitamin E Acetate | Tocopheryl Acetate |
| | 3.00 | Dracorin ® 100 SE | Glyceryl Stearate, PEG-100 Stearate |
| | 1.00 | Cremophor ® CO 410 | PEG-40 Hydrogenated Castor Oil |
| B | 3.00 | Z-COTE ® MAX | Zinc Oxide, Diphenyl Capryl Methicone |
| | 1.00 | Cetiol ® SB 45 | Butyrospermum Parkii (Shea Butter) |
| | 6.50 | Finsolv ® TN | C12-15 Alkyl Benzoate |
| C | 5.00 | Butylene Glycol | Butylene Glycol |
| | 0.30 | Keltrol ® | Xanthan Gum |
| | 0.10 | Edeta BD | Disodium EDTA |
| | 0.10 | Allantoin | Allantoin |
| | 2.0 | Mexoryl ® SX | Terephthalidene Dicamphor Sulfonic Acid |
| | 66.20 | Water demin. | Aqua dem. |
| D | 2.00 | Simulgel ® NS | Hydroxyethyl Acrylate/Sodium |
| | | | Acryloyldimethyl Taurate Copolymer, |
| | | | Squalane, Polysorbate 60 |
| | 1.00 | Keratin-binding domain- | |
| | | reactive dye 14_264 | |
| | q.s. | Preservative | |
| A | 5.00 | Uvinul ® N 539 T | Octocrylene |
| | 2.00 | Uvinul ® A Plus | Diethylamino Hydrobenzoyl Hexyl Benzoate |
| | 0.80 | Rylo PG 11 | Polyglyceryl Dimer Soyate |
| | 1.00 | Span ™ 60 | Sorbitan Stearate |
| | 0.50 | Vitamin E Acetate | Tocopheryl Acetate |
| | 3.00 | Dracorin ® 100 SE | Glyceryl Stearate, PEG-100 Stearate |
| | 1.00 | Cremophor ® CO 410 | PEG-40 Hydrogenated Castor Oil |
| B | 3.00 | Z-COTE ® MAX | Zinc Oxide, Diphenyl Capryl Methicone |
| | 1.00 | Cetiol ® SB 45 | Butyrospermum Parkii (Shea Butter) |
| | 6.50 | Finsolv ® TN | C12-15 Alkyl Benzoate |
| C | 5.00 | Butylene Glycol | Butylene Glycol |
| | 0.30 | Keltrol ® | Xanthan Gum |
| | 0.10 | Edeta BD | Disodium EDTA |
| | 0.10 | Allantoin | Allantoin |
| | 2.0 | Mexoryl ® SX | Terephthalidene Dicamphor Sulfonic Acid |
| | 65.20 | Water demin. | Aqua dem. |
| D | 2.00 | Simulgel ® NS | Hydroxyethyl Acrylate/Sodium |
| | | | Acryloyldimethyl Taurate Copolymer, |
| | | | Squalane, Polysorbate 60 |
| | 2.00 | Keratin-binding domain- | |
| | | reactive dye 14_264 | |
| | q.s. | Preservative | |
| A | 5.00 | Uvinul ® N 539 T | Octocrylene |
| | 2.00 | Uvinul ® A Plus | Diethylamino Hydroxybenzoyl Hexyl |
| | | | Benzoate |
| | 2.00 | Mexoryl ® XL | Drometrizole Trisiloxane |
| | 0.80 | Rylo PG 11 | Polyglyceryl Dimer Soyate |
| | 1.00 | Span ™ 60 | Sorbitan Stearate |
| | 0.50 | Vitamin E Acetate | Tocopheryl Acetate |
| | 3.00 | Dracorin ® 100 SE | Glyceryl Stearate, PEG-100 Stearate |
| | 1.00 | Cremophor ® CO 410 | PEG-40 Hydrogenated Castor Oil |
| B | 3.00 | Z-COTE ® MAX | Zinc Oxide, Diphenyl Capryl Methicone |
| | 1.00 | Cetiol ® SB 45 | Butyrospermum Parkii (Shea Butter) |
| | 6.50 | Finsolv ® TN | C12-15 Alkyl Benzoate |
| C | 5.00 | Butylene Glycol | Butylene Glycol |
| | 0.30 | Keltrol ® | Xanthan Gum |
| | 0.10 | Edeta BD | Disodium EDTA |
| | 0.10 | Allantoin | Allantoin |
| | 67.10 | Water demin. | Aqua dem. |
| D | 2.00 | Simulgel ® NS | Hydroxyethyl Acrylate/Sodium |
| | | | Acryloyldimethyl Taurate Copolymer, |
| | | | Squalane, Polysorbate 60 |
| | 0.10 | Keratin-binding domain- | |
| | | reactive dye 14_264 | |
| | q.s. | Preservative | |
| A | 5.00 | Uvinul ® N 539 T | Octocrylene |
| | 2.00 | Tinosorb ® S | Bis-Ethylhexyloxyphenol Methoxyphenyl |
| | | | Triazine |
| | 0.80 | Rylo PG 11 | Polyglyceryl Dimer Soyate |
| | 1.00 | Span ™ 60 | Sorbitan Stearate |
| | 0.50 | Vitamin E Acetate | Tocopheryl Acetate |
| | 3.00 | Dracorin ® 100 SE | Glyceryl Stearate, PEG-100 Stearate |
| | 1.00 | Cremophor ® CO 410 | PEG-40 Hydrogenated Castor Oil |
| B | 3.00 | Z-COTE ® MAX | Zinc Oxide, Diphenyl Capryl Methicone |
| | 1.00 | Cetiol ® SB 45 | Butyrospermum Parkii (Shea Butter) |
| | 6.50 | Finsolv ® TN | C12-15 Alkyl Benzoate |
| C | 5.00 | Butylene Glycol | Butylene Glycol |
| | 0.30 | Keltrol ® | Xanthan Gum |
| | 0.10 | Edeta BD | Disodium EDTA |
| | 0.10 | Allantoin | Allantoin |
| | 66.20 | Water demin. | Aqua dem. |
| D | 2.00 | Simulgel ® NS | Hydroxyethyl Acrylate/Sodium |
| | | | Acryloyldimethyl Taurate Copolymer, |
| | | | Squalane, Polysorbate 60 |
| | 1.00 | Keratin-binding domain- | |
| | | reactive dye 14_264 | |
| | q.s. | Preservative | |
| A | 7.50 | Uvinul ® MC 80 | Ethylhexyl Methoxycinnamate |
| | 5.00 | Uvinul ® N 539 T | Octocrylene |
| | 3.00 | Emulgade ® PL 68/50 | Cetearyl Glucoside, Cetearyl Alcohol |
| | 2.00 | Dracorin ® 100 SE | Glyceryl Stearate, PEG-100 Stearate |
| | 1.00 | Fitoderm | Squalane |
| | 0.50 | Cremophor ® WO 7 | PEG-7 Hydrogenated Castor Oil |
| | 0.50 | Cremophor ® PS 20 | Polysorbate 20 |
| | 2.00 | Dry Flo Pure | Aluminum Starch Octenylsuccinate |
| B | 5.00 | Z-COTE ® MAX | Zinc Oxide, Diphenyl Capryl |
| | | | Methicone |
| C | 4.00 | 1,2-Propylene Glycol Care | Propylene Glycol |
| | 0.20 | Keltrol ® | Xanthan Gum |
| | 0.50 | Simulgel ® 600 | Acrylamide/Sodium |
| | | | Acryloyldimethyltaurate Copolymer, |
| | | | Isohexadecane, Polysorbate 80 |
| | 65.30 | Water demin. | Aqua dem. |
| | q.s. | Preservative | |
| | 0.50 | Vitamin E Acetate | Tocopheryl Acetate |
| | 2.00 | Keratin-binding domain-reactive | |
| | | dye 14_264 | |
| | 1.00 | RetiSTAR ™ | Caprylic/Capric Triglyceride, Sodium |
| | | | Ascorbate, Tocopherol, Retinol |
| A | 7.50 | Uvinul ® MC 80 | Ethylhexyl Methoxycinnamate |
| | 2.00 | Uvinul ® N 539 T | Octocrylene |
| | 3.00 | Emulgade ® PL 68/50 | Cetearyl Glucoside, Cetearyl Alcohol |
| | 2.00 | Dracorin ® 100 SE | Glyceryl Stearate, PEG-100 Stearate |
| | 1.00 | Fitoderm | Squalane |
| | 0.50 | Cremophor ® WO 7 | PEG-7 Hydrogenated Castor Oil |
| | 0.50 | Cremophor ® PS 20 | Polysorbate 20 |
| | 2.00 | Dry Flo Pure | Aluminum Starch Octenylsuccinate |
| B | 5.00 | T-Lite ® SF-S | Titanium Dioxide, Silica Hydrate, |
| | | | Alumina Hydrate, |
| | | | Methicone/Dimethicone Copolymer |
| C | 4.00 | 1,2-Propylene Glycol Care | Propylene Glycol |
| | 0.20 | Keltrol ® | Xanthan Gum |
| | 0.50 | Simulgel ® 600 | Acrylamide/Sodium |
| | | | Acryloyldimethyltaurate Copolymer, |
| | | | Isohexadecane, Polysorbate 80 |
| | 68.3 | Water demin. | Aqua dem. |
| | q.s. | Preservative | |
| | 0.50 | Vitamin E Acetate | Tocopheryl Acetate |
| | 1.00 | Keratin-binding domain-reactive | |
| | | dye 14_264 | |
| | 2.00 | RetiSTAR ™ | Caprylic/Capric Triglyceride, Sodium |
| | | | Ascorbate, Tocopherol, Retinol |
| A | 7.50 | Uvinul ® MC 80 | Ethylhexyl Methoxycinnamate |
| | 5.00 | Uvinul ® N 539 T | Octocrylene |
| | 3.00 | Emulgade ® PL 68/50 | Cetearyl Glucoside, Cetearyl Alcohol |
| | 2.00 | Dracorin ® 100 SE | Glyceryl Stearate, PEG-100 Stearate |
| | 1.00 | Fitoderm | Squalane |
| | 0.50 | Cremophor ® WO 7 | PEG-7 Hydrogenated Castor Oil |
| | 0.50 | Cremophor ® PS 20 | Polysorbate 20 |
| | 2.00 | Dry Flo Pure | Aluminum Starch Octenylsuccinate |
| B | 5.00 | T-Lite ® SF | Titanium Dioxide, Alumina Hydrate, |
| | | | Dimethicone/Methicone Copolymer |
| C | 4.00 | 1,2-Propylene Glycol Care | Propylene Glycol |
| | 1.00 | D-Panthenol 50 P | Panthenol, Propylene Glycol |
| | 0.20 | Keltrol ® | Xanthan Gum |
| | 0.50 | Simulgel ® 600 | Acrylamide/Sodium |
| | | | Acryloyldimethyltaurate Copolymer, |
| | | | Isohexadecane, Polysorbate 80 |
| | 65.30 | Water demin. | Aqua dem. |
| | q.s. | Preservative | |
| | 0.50 | Vitamin E Acetate | Tocopheryl Acetate |
| | 1.00 | Keratin-binding domain-reactive | |
| | | dye 14_264 | |
| | 1.00 | RetiSTAR ™ | Caprylic/Capric Triglyceride, Sodium |
| | | | Ascorbate, Tocopherol, Retinol |
| A | 5.50 | Uvinul ® MC 80 | Ethylhexyl Methoxycinnamate |
| | 2.00 | Uvinul ® A Plus | Diethylamino Hydroxybenzoyl Hexyl |
| | | | Benzoate |
| | 3.00 | Uvinul ® N 539 T | Octocrylene |
| | 3.00 | Emulgade ® PL 68/50 | Cetearyl Glucoside, Cetearyl Alcohol |
| | 2.00 | Dracorin ® 100 SE | Glyceryl Stearate, PEG-100 Stearate |
| | 1.00 | Fitoderm | Squalane |
| | 0.50 | Cremophor ® WO 7 | PEG-7 Hydrogenated Castor Oil |
| | 0.50 | Cremophor ® PS 20 | Polysorbate 20 |
| | 2.00 | Dry Flo Pure | Aluminum Starch Octenylsuccinate |
| B | 5.00 | T-Lite ® SF | Titanium Dioxide, Alumina Hydrate, |
| | | | Dimethicone/Methicone Copolymer |
| C | 4.00 | 1,2-Propylene Glycol Care | Propylene Glycol |
| | 0.20 | Keltrol ® | Xanthan Gum |
| | 0.50 | Simulgel ® 600 | Acrylamide/Sodium |
| | | | Acryloyldimethyltaurate Copolymer, |
| | | | Isohexadecane, Polysorbate 80 |
| | 67.30 | Water demin. | Aqua dem. |
| | q.s. | Preservative | |
| | 0.50 | Vitamin E Acetate | Tocopheryl Acetate |
| | 2.00 | Keratin-binding domain-reactive | |
| | | dye 14_264 | |
| | 1.00 | RetiSTAR ™ | Caprylic/Capric Triglyceride, Sodium |
| | | | Ascorbate, Tocopherol, Retinol |
| A | 1.00 | Abil ® Care 85 | Bis-PEG/PPG-16/16 PEG/PPG-16/16 |
| | | | Dimethicone, Caprylic/Capric |
| | | | Triglyceride |
| | 3.00 | Cremophor ® CO 40 | PEG-40 Hydrogenated Castor Oil |
| | 0.30 | Cremophor ® WO 7 | PEG-7 Hydrogenated Castor Oil |
| | 2.00 | Parsol 1789 | Butyl Methoxydibenzoylmethane |
| | 2.00 | Mexoryl ® XL | Drometrizole Trisilioxane |
| | 10.00 | Witconol APM | PPG-3 Myristyl Ether |
| | 1.00 | Uvinul ® T 150 | Ethylhexyl Triazone |
| | 1.00 | Dow Corning 345 Fluid | Cyclopentasiloxane, Cyclohexasiloxane |
| | 5.00 | Uvinul ® N 539 T | Octocrylene |
| B | 3.00 | Z-COTE ® MAX | Zinc Oxide, Diphenyl Capryl Methicone |
| C | 5.00 | 1,2-Propylene Glycol | Propylene Glycol |
| | 1.00 | Mexoryl ® SX | Terephthalidene Dicamphor Sulfonic |
| | | | Acid |
| | 0.20 | Keltrol ® | Xanthan Gum |
| | 0.06 | Edeta BD | Disodium EDTA |
| | 0.04 | TEA | Triethanolamine |
| | 0.30 | Carbopol ® Ultrez 10P | Carbomer |
| | 63.50 | Water demin. | Aqua dem. |
| | 1.00 | Keratin-binding domain-reactive | |
| | | dye 14_264 | |
| D | q.s. | Perfume oil | |
| | 0.50 | Glydant | DMDM Hydantoin |
| A | 5.50 | Uvinul ® MC 80 | Ethylhexyl Methoxycinnamate |
| | 2.00 | Uvinul ® A Plus | Diethylamino Hydroxybenzoyl Hexyl |
| | | | Benzoate |
| | 3.00 | Uvinul ® N 539 T | Octocrylene |
| | 3.00 | Emulgade ® PL 68/50 | Cetearyl Glucoside, Cetearyl Alcohol |
| | 2.00 | Dracorin ® 100 SE | Glyceryl Stearate, PEG-100 Stearate |
| | 1.00 | Fitoderm | Squalane |
| | 0.50 | Cremophor ® WO 7 | PEG-7 Hydrogenated Castor Oil |
| | 0.50 | Cremophor ® PS 20 | Polysorbate 20 |
| | 2.00 | Dry Flo Pure | Aluminum Starch Octenylsuccinate |
| B | 5.00 | T-Lite ® SF-S | Titanium Dioxide, Silica Hydrate, |
| | | | Alumina Hydrate, |
| | | | Methicone/Dimethicone Copolymer |
| C | 4.00 | 1,2-Propylene Glycol Care | Propylene Glycol |
| | 0.20 | Keltrol ® | Xanthan Gum |
| | 2.00 | Simulgel ® NS | Hydroxyethyl Acrylate/Sodium |
| | | | Acrylodimethyl Taurate Copolymer, |
| | | | Squalane, Polysorbate 60 |
| | 66.30 | Water demin. | Aqua dem. |
| | q.s. | Preservative | |
| | 0.50 | Vitamin E Acetate | Tocopheryl Acetate |
| | 0.50 | Keratin-binding domain-reactive | |
| | | dye 14_264 | |
| | 1.00 | RetiSTAR ™ | Caprylic/Capric Triglyceride, Sodium |
| | | | Ascorbate, Tocopherol, Retinol |
| A | 2.00 | Cremophor ® A 6 | Ceteareth-6, Stearyl Alcohol |
| | 2.00 | Cremophor ® A 25 | Ceteareth-25 |
| | 3.00 | Syncrowax HRC | Tribehenin |
| | 2.00 | Lanette O | Cetearyl Alcohol |
| | 2.00 | Luvitol ® EHO | Cetearyl Ethylhexanoate |
| | 5.00 | Uvinul ® MC 80 | Ethylhexyl Methoxycinnamate |
| | 1.00 | Ganex ® V-220 | VP/Eicosene Copolymer |
| | 7.00 | Isopropyl Palmitate | Isopropyl Palmitate |
| B | 3.00 | Z-COTE ® MAX | Zinc Oxide, Diphenyl Capryl |
| | | | Methicone |
| C | 0.20 | Keltrol ® | Xanthan Gum |
| | 0.50 | Simulgel ® NS | Hydroxyethyl Acrylate/Sodium |
| | | | Acryloyldimethyl Taurate Copolymer, |
| | | | Squalane, Polysorbate 60 |
| | 65.10 | Water demin. | Aqua dem. |
| | 0.20 | Edeta BD | Disodium EDTA |
| | 5.00 | 1,2-Propylene Glycol Care | Propylene Glycol |
| | 0.50 | Keratin-binding domain-reactive dye | |
| | | 14_264 | |
| D | 1.00 | Vitamin E Acetate | Tocopheryl Acetate |
| | q.s. | Preservative | |
| A | 2.00 | Cremophor ® A 6 | Ceteareth-6, Stearyl Alcohol |
| | 2.00 | Cremophor ® A 25 | Ceteareth-25 |
| | 3.00 | Syncrowax HRC | Tribehenin |
| | 2.00 | Lanette O | Cetearyl Alcohol |
| | 2.00 | Luvitol ® EHO | Cetearyl Ethylhexanoate |
| | 5.00 | Uvinul ® MC 80 | Ethylhexyl Methoxycinnamate |
| | 1.00 | Ganex ® V-220 | VP/Eicosene Copolymer |
| | 7.00 | Isopropyl Palmitate | Isopropyl Palmitate |
| B | 3.00 | T-Lite ® SF | Titanium Dioxide, Alumina Hydrate, |
| | | | Dimethicone/Methicone Copolymer |
| C | 0.50 | Keltrol ® | Xanthan Gum |
| | 0.50 | Simulgel ® NS | Hydroxyethyl Acrylate/Sodium |
| | | | Acryloyldimethyl Taurate Copolymer, |
| | | | Squalane, Polysorbate 60 |
| | 65.10 | Water demin. | Aqua dem. |
| | 0.20 | Edeta BD | Disodium EDTA |
| | 5.00 | 1,2-Propylene Glycol Care | Propylene Glycol |
| | 0.50 | Keratin-binding domain-reactive dye | |
| | | 14_264 | |
| D | 1.00 | Vitamin E Acetate | Tocopheryl Acetate |
| | q.s. | Preservative | |
| A | 2.00 | Cremophor ® A 6 | Ceteareth-6, Stearyl Alcohol |
| | 2.00 | Cremophor ® A 25 | Ceteareth-25 |
| | 3.00 | Syncrowax HRC | Tribehenin |
| | 2.00 | Lanette O | Cetearyl Alcohol |
| | 2.00 | Luvitol ® EHO | Cetearyl Ethylhexanoate |
| | 5.00 | Uvinul ® MC 80 | Ethylhexyl Methoxycinnamate |
| | 1.00 | Ganex ® V-220 | VP/Eicosene Copolymer |
| | 7.00 | Isopropyl Palmitate | Isopropyl Palmitate |
| B | 3.00 | T-Lite ® SF-S | Titanium Dioxide, Silica Hydrate, |
| | | | Alumina Hydrate, |
| | | | Methicone/Dimethicone Copolymer |
| C | 0.50 | Keltrol ® | Xanthan Gum |
| | 0.50 | Simulgel ® NS | Hydroxyethyl Acrylate/Sodium |
| | | | Acryloyldimethyl Taurate Copolymer, |
| | | | Squalane, Polysorbate 60 |
| | 64.60 | Water demin. | Aqua dem. |
| | 0.20 | Edeta BD | Disodium EDTA |
| | 5.00 | 1,2-Propylene Glycol Care | Propylene Glycol |
| | 1.00 | Keratin-binding domain-reactive dye | |
| | | 14_264 | |
| D | 1.00 | Vitamin E Acetate | Tocopheryl Acetate |
| | q.s. | Preservative | |
| A | 2.00 | Cremophor ® A 6 | Ceteareth-6, Stearyl Alcohol |
| | 2.00 | Cremophor ® A 25 | Ceteareth-25 |
| | 3.00 | Syncrowax HRC | Tribehenin |
| | 2.00 | Lanette O | Cetearyl Alcohol |
| | 2.00 | Luvitol ® EHO | Cetearyl Ethylhexanoate |
| | 5.00 | Uvinul ® MC 80 | Ethylhexyl Methoxycinnamate |
| | 1.00 | Ganex ® V-220 | VP/Eicosene Copolymer |
| | 7.00 | Isopropyl Palmitate | Isopropyl Palmitate |
| B | 3.00 | T-Lite ® SF-S | Titanium Dioxide, Silica Hydrate, |
| | | | Alumina Hydrate, |
| | | | Methicone/Dimethicone Copolymer |
| C | 0.50 | Keltrol ® | Xanthan Gum |
| | 0.50 | Simulgel ® NS | Hydroxyethyl Acrylate/Sodium |
| | | | Acryloyldimethyl Taurate Copolymer, |
| | | | Squalane, Polysorbate 60 |
| | 64.10 | Water demin. | Aqua dem. |
| | 2.00 | Neo Heliopan ® AP | Disodium Phenyl Dibenzimidazole |
| | | | Tetrasulfonate |
| | 0.20 | Edeta BD | Disodium EDTA |
| | 5.00 | 1,2-Propylene Glycol Care | Propylene Glycol |
| D | 1.00 | Vitamin E Acetate | Tocopheryl Acetate |
| | 1.00 | Keratin-binding domain-reactive dye | |
| | | 14_264 | |
| | q.s. | Preservative | |
| A | 2.00 | Cremophor ® A 6 | Ceteareth-6, Stearyl Alcohol |
| | 2.00 | Cremophor ® A 25 | Ceteareth-25 |
| | 3.00 | Syncrowax HRC | Tribehenin |
| | 2.00 | Lanette O | Cetearyl Alcohol |
| | 2.00 | Luvitol ® EHO | Cetearyl Ethylhexanoate |
| | 7.00 | Uvinul ® N 539 T | Octocrylene |
| | 1.00 | Ganex ® V-220 | VP/Eicosene Copolymer |
| | 7.00 | Isopropyl Palmitate | Isopropyl Palmitate |
| B | 3.00 | T-Lite ® SF-S | Titanium Dioxide, Silica Hydrate. |
| | | | Alumina Hydrate, |
| | | | Methicone/Dimethicone Copolymer |
| C | 0.50 | Keltrol ® | Xanthan Gum |
| | 0.50 | Simulgel ® NS | Hydroxyethyl Acrylate/Sodium |
| | | | Acryloyldimethyl Taurate Copolymer, |
| | | | Squalane, Polysorbate 60 |
| | 64.60 | Water demin. | Aqua dem. |
| | 1.00 | Mexoryl ® SX | Terephthalidene Dicamphor Sulfonic |
| | | | Acid |
| | 0.20 | Edeta BD | Disodium EDTA |
| | 5.00 | 1,2-Propylene Glycol Care | Propylene Glycol |
| D | 1.00 | Vitamin E Acetate | Tocopheryl Acetate |
| | 1.00 | Keratin-binding domain-reactive dye | |
| | | 14_264 | |
| | q.s. | Preservative | |
| A | 2.00 | Cremophor ® A 6 | Ceteareth-6, Stearyl Alcohol |
| | 2.00 | Cremophor ® A 25 | Ceteareth-25 |
| | 3.00 | Syncrowax HRC | Tribehenin |
| | 2.00 | Lanette O | Cetearyl Alcohol |
| | 2.00 | Luvitol ® EHO | Cetearyl Ethylhexanoate |
| | 2.00 | Mexoryl ® XL | Drometrizole Trisiloxane |
| | 5.00 | Uvinul ® N 539 T | Octocrylene |
| | 1.00 | Ganex ® V-220 | VP/Eicosene Copolymer |
| | 7.00 | Isopropyl Palmitate | Isopropyl Palmitate |
| B | 3.00 | T-Lite ® SF | Titanium Dioxide, Alumina Hydrate, |
| | | | Dimethicone/Methicone Copolymer |
| C | 0.50 | Keltrol ® | Xanthan Gum |
| | 0.50 | Simulgel ® NS | Hydroxyethyl Acrylate/Sodium |
| | | | Acryloyldimethyl Taurate Copolymer, |
| | | | Squalane, Polysorbate 60 |
| | 65.10 | Water demin. | Aqua dem. |
| | 0.20 | Edeta BD | Disodium EDTA |
| | 5.00 | 1,2-Propylene Glycol Care | Propylene Glycol |
| D | 1.00 | Vitamin E Acetate | Tocopheryl Acetate |
| | 0.50 | Keratin-binding domain-reactive dye | |
| | | 14_264 | |
| | q.s. | Preservative | |
| | 1.00 | Urea | Urea |
| | 2.00 | Neo Heliopan ® AP | Disodium Phenyl Dibenzimidazole |
| | | | Tetrasulfonate |
| | 2.00 | Glycerin 87% | Glycerin |
| | 1.20 | Aristoflex ™ AVC | Ammonium |
| | | | Acryloyldimethyltaurate/VP |
| | | | Copolymer |
| | 71.30 | Water demin. | Aqua dem. |
| B | 3.00 | Cremophor ® CO 40 | PEG-40 Hydrogenated Castor Oil |
| | q.s. | Perfume oil | |
| | 5.00 | Miglyol 812 | Caprylic/Capric Triglyceride |
| | 2.00 | Uvinul ® N 539 T | Octocrylene |
| | 8.00 | Z-COTE ® MAX | Zinc Oxide, Diphenyl Capryl |
| | | | Methicone |
| | 5.00 | Keratin-binding domain-reactive dye | |
| | | 14_264 | |
| | q.s. | Preservative | |
| | 5.00 | Z-COTE ® MAX | Zinc Oxide, Diphenyl Capryl |
| | | | Methicone |
| | 2.00 | Parsol ® 1789 | Butyl Methoxydibenzoylmethane |
| | 1.00 | Uvinul ® T 150 | Ethylhexyl Triazone |
| | 5.00 | Uvinul ® MC 80 | Ethylhexyl Methoxycinnamate |
| | 2.00 | Uvinul ® T 539 N | Octocrylene |
| | 0.50 | Abil ® 350 | Dimethicone |
| | 2.75 | Carnico wax LT 20 | Copernica Cerifera (Carnauba) Wax, |
| | | | Paraffin |
| | 3.70 | Candelilla wax LT 281 LJ | Euphorbia Cerifera (Candelilla) Wax |
| | 1.80 | Beeswax 3050 PH | Beeswax |
| | 3.20 | TeCero wax 30445 | Microcrystalline Wax |
| | 3.20 | TeCero wax 1030 K | Microcrystalline Wax |
| | 1.34 | Cutina CP | Cetyl Palmitate |
| | 6.40 | Vaseline | Petrolatum |
| | 7.30 | Softisan 100 | Hydrogenated Coco-Glycerides |
| | 10.00 | Luvitol ® EHO | Cetearyl Ethylhexanoate |
| | 0.17 | Bisabolol nat. | Bisabolol |
| | 1.84 | Vitamin E Acetate | Tocopheryl Acetate |
| | 0.42 | D,L-Alpha-Tocopherol | Tocopherol |
| | 1.00 | Keratin-binding domain-reactive dye | |
| | | 14_264 | |
| | 40.38 | Castor Oil | Ricinus Communis (Castor) Oil |
| | 5.00 | T-Lite ® SF | Titanium Dioxide, Alumina Hydrate, |
| | | | Dimethicone/Methicone Copolymer |
| | 2.00 | Parsol ® 1789 | Butyl Methoxydibenzoylmethane |
| | 1.00 | Uvinul ® T 150 | Ethylhexyl Triazone |
| | 3.00 | Uvinul ® MC 80 | Ethylhexyl Methoxycinnamate |
| | 2.00 | Uvinul ® N 539 T | Octocrylene |
| | 0.50 | Abil ® 350 | Dimethicone |
| | 2.75 | Carnico wax LT 20 | Copernica Cerifera (Carnauba) Wax, |
| | | | Paraffin |
| | 3.70 | Candelilla wax LT 281 LJ | Euphorbia Cerifera (Candelilla) Wax |
| | 1.80 | Beeswax 3050 PH | Beeswax |
| | 3.20 | TeCero wax 30445 | Microcrystalline Wax |
| | 3.20 | TeCero wax 1030 K | Microcrystalline Wax |
| | 1.34 | Cutina CP | Cetyl Palmitate |
| | 6.40 | Vaseline | Petrolatum |
| | 7.30 | Softisan 100 | Hydrogenated Coco-Glycerides |
| | 10.00 | Luvitol ® EHO | Cetearyl Ethylhexanoate |
| | 0.17 | Bisabolol nat. | Bisabolol |
| | 1.84 | Vitamin E Acetate | Tocopheryl Acetate |
| | 0.42 | D,L-Alpha-Tocopherol | Tocopherol |
| | 1.00 | Keratin-binding domain-reactive dye | |
| | | 14_264 | |
| | 40.38 | Castor Oil | Ricinus Communis (Castor) Oil |
| | 5.00 | T-Lite ® SF-S | Titanium Dioxide, Silica Hydrate, |
| | | | Alumina Hydrate, |
| | | | Methicone/Dimethicone Copolymer |
| | 2.00 | Uvinul ® A Plus | Diethylamino Hydroxybenzoyl Hexyl |
| | | | Benzoate |
| | 2.00 | Mexoryl ® XL | Drometrizole Trisiloxane |
| | 3.00 | Uvinul ® MC 80 | Ethylhexyl Methoxycinnamate |
| | 0.50 | Abil ® 350 | Dimethicone |
| | 2.75 | Carnico wax LT 20 | Copernica Cerifera (Carnauba) |
| | | | Wax, Paraffin |
| | 3.70 | Candelilla wax LT 281 LJ | Euphorbia Cerifera (Candelilla) |
| | | | Wax |
| | 1.80 | Beeswax 3050 PH | Beeswax |
| | 3.20 | TeCero wax 30445 | Microcrystalline Wax |
| | 3.20 | TeCero wax 1030 K | Microcrystalline Wax |
| | 1.34 | Cutina CP | Cetyl Palmitate |
| | 6.40 | Vaseline | Petrolatum |
| | 7.30 | Softisan 100 | Hydrogenated Coco-Glycerides |
| | 10.00 | Luvitol ® EHO | Cetearyl Ethylhexanoate |
| | 0.17 | Bisabolol nat. | Bisabolol |
| | 1.84 | Vitamin E Acetate | Tocopheryl Acetate |
| | 0.42 | D,L-Alpha-Tocopherol | Tocopherol |
| | 2.00 | Keratin-binding domain-reactive dye | |
| | | 14_264 | |
| | 39.38 | Castor Oil | Ricinus Communis (Castor) Oil |
| A | 6.00 | Cremophor ® WO 7 | PEG-7 Hydrogenated Castor Oil |
| | 2.00 | Elfacos ® ST 9 | PEG-45/Dodecyl Glycol Copolymer |
| | 3.00 | Isopropyl myristate | Isopropyl Myristate |
| | 8.00 | Jojoba oil | Simmondsia Chinensis (Jojoba) Seed |
| | | | Oil |
| | 4.00 | Uvinul ® MC 80 | Ethylhexyl Methoxycinnamate |
| | 2.00 | Uvinul ® A Plus | Diethylamino Hydroxybenzoyl Hexyl |
| | | | Benzoate |
| | 1.00 | Abil ® 350 | Dimethicone |
| B | 5.00 | Z-COTE ® MAX | Zinc Oxide, Diphenyl Capryl Methicone |
| | 3.00 | T-Lite ® SF | Titanium Dioxide, Alumina Hydrate, |
| | | | Dimethicone/Methicone Copolymer |
| C | 0.20 | Edeta BD | Disodium EDTA |
| | 5.00 | Glycerin 87% | Glycerin |
| | 0.30 | Chemag 2000 | Imidazolidinyl Urea |
| | 59.00 | Water demin. | Aqua dem. |
| D | q.s. | Perfume oil | |
| | 1.00 | Keratin-binding domain-reactive | |
| | | dye 14_264 | |
| | q.s. | Preservative | |
| | 2.00 | Cremophor ® A 6 | Ceteareth-6, Stearyl Alcohol |
| | 2.00 | Cremophor ® A 25 | Ceteareth-25 |
| | 3.00 | Syncrowax HRC | Tribehenin |
| | 2.00 | Lanette O | Cetearyl Alcohol |
| | 2.00 | Luvitol ® EHO | Cetearyl Ethylhexanoate |
| | 5.00 | Uvinul ® MC 80 | Ethylhexyl Methoxycinnamate |
| | 1.00 | Uvinul ® T 150 | Ethylhexyl Triazone |
| | 1.00 | Ganex ® V-220 | VP/Eicosene Copolymer |
| | 7.00 | Isopropyl myristate | Isopropyl Myristate |
| B | 5.00 | Z-COTE ® MAX | Zinc Oxide, Diphenyl Capryl |
| | | | Methicone |
| C | 0.20 | Keltrol ® | Xanthan Gum |
| | 0.50 | Simulgel ® NS | Hydroxyethyl Acrylate/Sodium |
| | | | Acryloyldimethyl Taurate |
| | | | Copolymer, Squalane, |
| | | | Polysorbate 60 |
| | 61.10 | Water demin. | Aqua dem. |
| | 0.20 | Edeta BD | Disodium EDTA |
| | 5.00 | 1,2-Propylene Glycol Care | Propylene Glycol |
| D | 1.00 | Vitamin E Acetate | Tocopheryl Acetate |
| | 1.50 | Keratin-binding domain-reactive dye | |
| | | 14_264 | |
| | q.s. | Preservative | |
| A | 2.00 | Luvitol ® EHO | Cetearyl Ethylhexanoate |
| | 5.00 | Paraffin oil | Mineral Oil |
| | 5.00 | Z-COTE ® MAX | Zinc Oxide, Diphenyl Capryl |
| | | | Methicone |
| B | 1.00 | Cremophor ® A 6 | Ceteareth-6, Stearyl Alcohol |
| | 2.00 | Cremophor ® A 25 | Ceteareth-25 |
| | 3.00 | Glycerinmonostearate | Glyceryl Stearate |
| | 4.00 | Cetylstearyl alcohol | Cetearyl Alcohol |
| C | 5.00 | 1,2-Propylene Glycol Care | Propylene Glycol |
| | 7.50 | Luviquat Care | Polyquaternium-44 |
| | q.s. | Preservative | |
| | q.s. | Perfume oil | |
| | 1.00 | Keratin-binding domain-reactive dye | |
| | | 14_264 | |
| | 64.50 | Water demin. | Aqua dem. |
| | 5.00 | T-Lite ® SF | Titanium Dioxide, Alumina |
| | | | Hydrate, Dimethicone/Methicone |
| | | | Copolymer |
| | 10.00 | Z-COTE ® MAX | Zinc Oxide, Diphenyl Capryl |
| | | | Methicone |
| | 12.00 | Beeswax 3044 PH | Beeswax |
| | 8.00 | Candelilla wax LT 281 LJ | Euphorbia Cerifera (Candelilla) |
| | | | Wax |
| | 5.00 | Tegin | Glyceryl Stearate SE |
| | 5.00 | Dow Corning ® 345 Fluid | Cyclopentasiloxane, |
| | | | Cyclohexasiloxane |
| | 5.00 | Witconol ® APM | PPG-3 Myristyl Ether |
| | 5.00 | Softisan 154 | Hydrogenated Palm Oil |
| | 8.00 | Paraffin oil, high viscosity | Mineral Oil |
| | 3.00 | Vaseline | Petrolatum |
| | 2.00 | Keratin-binding domain-reactive dye | |
| | | 14_264 | |
| | 32.00 | Castor Oil | Ricinus Communis (Castor) Oil |
| | 3.00 | Uvinul ® MC 80 | Ethylhexyl Methoxycinnamate |
| | 2.00 | Uvinul ® T 150 | Ethylhexyl Triazone |
| | 2.00 | Uvinul ® A Plus | Diethylamino Hydroxybenzoyl |
| | | | Hexyl Benzoate |
| | 10.00 | Z-COTE ® MAX | Zinc Oxide, Diphenyl Capryl |
| | | | Methicone |
| | 12.00 | Beeswax 3044 PH | Beeswax |
| | 3.00 | Vaseline | Petrolatum |
| | 8.00 | Candelilla wax LT 281 LJ | Euphorbia Cerifera (Candelilla) |
| | | | Wax |
| | 8.00 | Paraffin oil, high viscosity | Mineral Oil |
| | 5.00 | Tegin | Glyceryl Stearate SE |
| | 5.00 | Softisan 154 | Hydrogenated Palm Oil |
| | 5.00 | Witconol APM | PPG-3 Myristyl Ether |
| | 5.00 | Dow Corning 345 Fluid | Cyclopentasiloxane, |
| | | | Cyclohexasiloxane |
| | 0.10 | Keratin-binding domain-reactive dye | |
| | | 14_264 | |
| | 28.90 | Castor Oil | Ricinus Communis (Castor) Oil |
| | 5.00 | T-Lite ® SF | Titanium Dioxide, Alumina |
| | | | Hydrate, Dimethicone/Methicone |
| | | | Copolymer |
| | 6.00 | Finsolv ® TN | C12-15 Alkyl Benzoate |
| | 10.00 | Uvinul ® MC 80 | Ethylhexyl Methoxycinnamate |
| | 6.00 | Miglyol ® 812 | Caprylic/Capric Triglyceride |
| | 5.00 | Arlacel ® P 135 | PEG-30 Dipolyhydroxystearate |
| | 2.00 | Ganex ® V 216 | PVP/Hexadecene Copolymer |
| | 2.00 | Elfacos ® ST 9 | PEG-45/Dodecyl Glycol |
| | | | Copolymer |
| B | 3.00 | 1,2-Propylene Glycol Care | Propylene Glycol |
| | 0.10 | Edeta BD | Disodium EDTA |
| | 1.00 | Magnesium sulfate 7-hydrate | Magnesium Sulfate |
| | 59.40 | Water demin. | Aqua dem. |
| | 0.50 | Keratin-binding domain-reactive dye | |
| | | 14_264 | |
| | q.s. | Preservative | |
| A | 4.00 | Dehymuls ® SBL | Polyglyceryl-2 |
| | | | Dipolyhydroxystearate, Dicaprylyl |
| | | | Ether, Cocoglycerides, Sorbitan |
| | | | Sesquioleate, Cera Alba, |
| | | | Aluminum Stearates, Dicocoyl |
| | | | Pentaerythrityl Distearyl Citrate |
| | 1.00 | Dehymuls ® PGPH | Polyglyceryl-2 |
| | | | Dipolyhydroxystearate |
| | 8.00 | Finsolv ® TN | C12-15 Alkyl Benzoate |
| | 4.00 | Miglyol ® 812 | Caprylic/Capric Triglyceride |
| | 4.00 | Uvinul ® MC 80 | Ethylhexyl Methoxycinnamate |
| | 2.00 | Uvinul ® N 539 T | Octocrylene |
| B | 5.00 | Z-COTE ® MAX | Zinc Oxide, Diphenyl Capryl |
| | | | Methicone |
| C | 3.00 | 1,2-Propylene Glycol Care | Propylene Glycol |
| | 0.30 | Abiol | Imidazolidinyl Urea |
| | 1.00 | Magnesium sulfate 7-hydrate | Magnesium Sulfate |
| | 66.20 | Water demin. | Aqua dem. |
| | 1.50 | Keratin-binding domain-reactive dye | |
| | | 14_264 | |
| D | q.s. | Preservative | |
| A | 4.00 | Dehymuls ® SBL | Polyglyceryl-2 |
| | | | Dipolyhydroxystearate, Dicaprylyl |
| | | | Ether, Cocoglycerides, Sorbitan |
| | | | Sesquioleate, Cera Alba, |
| | | | Aluminum Stearates, Dicocoyl |
| | | | Pentaerythrityl Distearyl Citrate |
| | 1.00 | Dehymuls ® PGPH | Polyglyceryl-2 |
| | | | Dipolyhydroxystearate |
| | 8.00 | Finsolv ® TN | C12-15 Alkyl Benzoate |
| | 4.00 | Miglyol ® 812 | Caprylic/Capric Triglyceride |
| | 4.00 | Uvinul ® MC 80 | Ethylhexyl Methoxycinnamate |
| | 2.00 | Uvinul ® N 539 T | Octocrylene |
| B | 5.00 | T-Lite ® SF-S | Titanium Dioxide, Silica Hydrate, |
| | | | Alumina Hydrate, |
| | | | Methicone/Dimethicone Copolymer |
| C | 3.00 | 1,2-Propylene Glycol Care | Propylene Glycol |
| | 0.30 | Abiol | Imidazolidinyl Urea |
| | 1.00 | Magnesium sulfate 7-hydrate | Magnesium Sulfate |
| | 1.00 | Keratin-binding domain-reactive dye | |
| | | 14_264 | |
| | 66.70 | Water demin. | Aqua dem. |
| D | q.s. | Preservative | |
| A | 4.00 | Dehymuls ® SBL | Polyglyceryl-2 |
| | | | Dipolyhydroxystearate, Dicaprylyl |
| | | | Ether, Cocoglycerides, Sorbitan |
| | | | Sesquioleate, Cera Alba, |
| | | | Aluminum Stearates, Dicocoyl |
| | | | Pentaerythrityl Distearyl Citrate |
| | 1.00 | Dehymuls ® PGPH | Polyglyceryl-2 |
| | | | Dipolyhydroxystearate |
| | 8.00 | Finsolv ® TN | C12-15 Alkyl Benzoate |
| | 4.00 | Miglyol ® 812 | Caprylic/Capric Triglyceride |
| | 8.00 | Uvinul ® A Plus B | Ethylhexyl Methoxycinnamate and |
| | | | Diethylamino Hydroxybenzoyl |
| | | | hexyl Benzoate |
| | 2.00 | Uvinul ® N 539 T | Octocrylene |
| B | 5.00 | Z-COTE ® MAX | Zinc Oxide, Diphenyl Capryl |
| | | | Methicone |
| C | 3.00 | 1,2-Propylene Glycol Care | Propylene Glycol |
| | 0.30 | Abiol | Imidazolidinyl Urea |
| | 1.00 | Magnesium sulfate 7-hydrate | Magnesium Sulfate |
| | 0.10 | Keratin-binding domain-reactive dye | |
| | | 14_264 | |
| | 63.60 | Water demin. | Aqua dem. |
| | q.s. | Preservative | |
| A | 4.00 | Dehymuls ® SBL | Polyglyceryl-2 |
| | | | Dipolyhydroxystearate, Dicaprylyl |
| | | | Ether, Cocoglycerides, Sorbitan |
| | | | Sesquioleate, Cera Alba, |
| | | | Aluminum Stearates, Dicocoyl |
| | | | Pentaerythrityl Distearyl Citrate |
| | 1.00 | Dehymuls ® PGPH | Polyglyceryl-2 |
| | | | Dipolyhydroxystearate |
| | 8.00 | Finsolv ® TN | C12-15 Alkyl Benzoate |
| | 4.00 | Miglyol ® 812 | Caprylic/Capric Triglyceride |
| | 8.00 | Uvinul ® A Plus B | Ethylhexyl Methoxycinnamate and |
| | | | Diethylamino Hydroxybenzoyl |
| | | | Hexyl Benzoate |
| | 2.00 | Uvinul ® N 539 T | Octocrylene |
| B | 5.00 | T-Lite ® SF | Titanium Dioxide, Alumina Hydrate, |
| | | | Dimethicone/Methicene Copolymor |
| C | 3.00 | 1,2-Propylene Glycol Care | Propylene Glycol |
| | 0.30 | Abiol | Imidazolidinyl Urea |
| | 1.00 | Magnesium sulfate 7-hydrate | Magnesium Sulfate |
| | 63.50 | Water demin. | Aqua dem. |
| | 0.20 | Keratin-binding domain-reactive dye | |
| | | 14_264 | |
| | q.s. | Preservative | |
| A | 4.00 | Dehymuls ® SBL | Polyglyceryl-2 |
| | | | Dipolyhydroxystearate, Dicaprylyl |
| | | | Ether, Cocoglycerides, Sorbitan |
| | | | Sesquioleate, Cera Alba, |
| | | | Aluminum Stearates, Dicocoyl |
| | | | Pentaerythrityl Distearyl Citrate |
| | 1.00 | Dehymuls ® PGPH | Polyglyceryl-2 |
| | | | Dipolyhydroxystearate |
| | 8.00 | Finsolv ® TN | C12-15 Alkyl Benzoate |
| | 4.00 | Miglyol ® 812 | Caprylic/Capric Triglyceride |
| | 8.00 | Uvinul ® A Plus B | Ethylhexyl Methoxycinnamate and |
| | | | Diethylamino Hydroxybenzoyl |
| | | | hexyl Benzoate |
| | 2.00 | Uvinul ® N 539 T | Octocrylene |
| B | 5.00 | T-Lite ® SF-S | Titanium Dioxide, Silica Hydrate, |
| | | | Alumina Hydrate, |
| | | | Methicone/Dimethicone Copolymer |
| C | 3.00 | 1,2-Propylene Glycol Care | Propylene Glycol |
| | 0.30 | Abiol | Imidazolidinyl Urea |
| | 1.00 | Magnesium sulfate 7-hydrate | Magnesium Sulfate |
| | 0.50 | Keratin-binding domain-reactive dye | |
| | | 14_264 | |
| | 63.20 | Water demin. | Aqua dem. |
| | q.s. | Preservative | |
| A | 4.00 | Dehymuls ® SBL | Polyglyceryl-2 |
| | | | Dipolyhydroxystearate, Dicaprylyl |
| | | | Ether, Cocoglycerides, Sorbitan |
| | | | Sesquioleate, Cera Alba, |
| | | | Aluminum Stearates, Dicocoyl |
| | | | Pentaerythrityl Distearyl Citrate |
| | 1.00 | Dehymuls ® PGPH | Polyglyceryl-2 |
| | | | Dipolyhydroxystearate |
| | 8.00 | Finsolv ® TN | C12-15 Alkyl Benzoate |
| | 4.00 | Miglyol ® 812 | Caprylic/Capric Triglyceride |
| | 7.00 | Uvinul ® MC 80 | Ethylhexyl Methoxycinnamate |
| | 2.00 | Mexoryl ® XL | Drometrizole Trisiloxane |
| B | 5.00 | Z-COTE ® MAX | Zinc Oxide, Diphenyl Capryl |
| | | | Methicone |
| C | 3.00 | 1,2-Propylene Glycol Care | Propylene Glycol |
| | 0.30 | Abiol | Imidazolidinyl Urea |
| | 1.00 | Magnesium sulfate 7-hydrate | Magnesium Sulfate |
| | 64.69 | Water demin. | Aqua dem. |
| | 0.01 | Keratin-binding domain-reactive dye | |
| | | 14_264 | |
| | q.s. | Preservative | |
| A | 7.50 | Uvinul ® MC 80 | Ethylhexyl Methoxycinnamate |
| | 3.00 | Uvinul ® N 539 T | Octocrylene |
| | 2.00 | Uvinul ® A Plus | Diethylamino Hydroxybenzoyl |
| | | | Hexyl Benzoate |
| | 1.00 | Cremophor ® CO 40 | PEG-40 Hydrogenated Castor Oil |
| | 10.00 | Miglyol 812 | Caprylic/Capric Triglyceride |
| | 1.50 | Dow Corning ® 345 Fluid | Cyclopentasiloxane, |
| | | | Cyclohexasiloxane |
| B | 3.50 | Luvigel ® EM | Caprylic/Capric Triglyceride, |
| | | | Sodium Acrylates Copolymer |
| C | 46.00 | Water demin. | Aqua dem. |
| D | 5.00 | 1,2-Propylene Glycol Care | Propylene Glycol |
| | 0.50 | Cremophor ® A 25 | Ceteareth-25 |
| | 0.05 | Keratin-binding domain-reactive dye | |
| | | 14_264 | |
| | 20.00 | Ethanol 96% | Alcohol |
| A | 1.00 | Uvinul ® A Plus | Diethylamino Hydroxybenzoyl |
| | | | Hexyl Benzoate |
| | 1.00 | Tinosorb ® S | Bis-Ethylhexyloxyphenol |
| | | | Methoxyphenyl Triazine |
| | 3.00 | Uvinul ® MC 80 | Ethylhexyl Methoxycinnamate |
| | 8.00 | Miglyol ® 812 | Caprylic/Capric Triglyceride |
| | 1.50 | Dow Corning ® 350 Fluid | Dimethicone |
| | 3.00 | Z-COTE ® MAX | Zinc Oxide, Diphenyl Capryl |
| | | | Methicone |
| | 3.00 | Finsolv ® TN | C12-15 Alkyl Benzoate |
| | 1.00 | Cremophor ® CO 40 | PEG-40 Hydrogenated Castor Oil |
| B | 2.00 | Luvigel ® EM | Caprylic/Capric Triglyceride, |
| | | | Sodium Acrylates Copolymer |
| C | 54.80 | Water demin. | Aqua dem. |
| D | 15.00 | Ethanol 96% | Alcohol |
| | 5.00 | 1,2-Propylene Glycol Care | Propylene Glycol |
| | 0.50 | Cremophor ® A 25 | Ceteareth-25 |
| | 1.00 | Keratin-binding domain-reactive dye | |
| | | 14_264 | |
| | 1.00 | Vitamin E Acetate | Tocopheryl Acetate |
| | 0.20 | Bisabolol rac. | Bisabolol |
| A | 4.00 | Dehymuls ® SBL | Polyglyceryl-2 |
| | | | Dipolyhydroxystearate, |
| | | | Dicaprylyl Ether, |
| | | | Cocoglycerides, Sorbitan |
| | | | Sesquioleate, Cera Alba, |
| | | | Aluminum Stearates, Dicocoyl |
| | | | Pentaerythrityl Distearyl Citrate |
| | 1.00 | Dehymuls ® PGPH | Polyglyceryl-2 |
| | | | Dipolyhydroxystearate |
| | 6.00 | Finsolv ® TN | C12-15 Alkyl Benzoate |
| | 6.00 | Miglyol ® 812 | Caprylic/Capric Triglyceride |
| | 5.00 | Uvinul ® MC 80 | Ethylhexyl Methoxycinnamate |
| | 3.00 | Neo Heliopan ® HMS | Homosalate |
| B | 5.00 | Z-COTE ® MAX | Zinc Oxide, Diphenyl Capryl |
| | | | Methicone |
| C | 3.00 | 1,2-Propylene Glycol Care | Propylene Glycol |
| | 0.30 | Chemag 2000 | Imidazolidinyl Urea |
| | 1.00 | Magnesium sulfate 7-hydrate | Magnesium Sulfate |
| | 65.10 | Water demin. | Aqua dem. |
| | 0.10 | Keratin-binding domain-reactive dye | |
| | | 14_264 | |
| | q.s. | Preservative | |
| A | 4.00 | Tego ® Care 450 | Polyglyceryl-3 Methyl Glucose |
| | | | Distearate |
| | 4.50 | Uvinul ® MC 80 | Ethylhexyl Methoxycinnamate |
| | 3.00 | Uvinul ® N 539 T | Octocrylene |
| | 2.00 | Uvinul ® T 150 | Ethylhexyl Triazone |
| | 0.50 | Vitamin E Acetate | Tocopheryl Acetate |
| B | 5.00 | Isohexadecane | Isohexadecane |
| | 5.00 | Cosmacol ® EMI | Di-C12-13 Alkyl Malate |
| | 3.50 | Cetiol ® SN | Cetearyl Isononanoate |
| | 1.00 | Ganex ® V-220 | VP/Eicosene Copolymer |
| | 5.00 | T-Lite ® SF | Titanium Dioxide, Alumina |
| | | | Hydrate, Dimethicone/Methicone |
| | | | Copolymer |
| C | 60.00 | Water demin. | Water |
| | 5.00 | Glycerin 87% | Glycerin |
| | 1.00 | Lanette E | Sodium Cetearyl Sulfate |
| | 0.30 | Keltrol ® | Xanthan Gum |
| | 0.20 | Keratin-binding domain-reactive dye | |
| | | 14_264 | |
| D | q.s. | Preservative | |
| A | 4.00 | Tego ® Care 450 | Polyglyceryl-3 Methyl Glucose |
| | | | Distearate |
| | 4.50 | Uvinul ® MC 80 | Ethylhexyl Methoxycinnamate |
| | 3.00 | Uvinul ® N 539 T | Octocrylene |
| | 2.00 | Neo Heliopan ® HMS | Homosalate |
| | 0.50 | Vitamin E Acetate | Tocopheryl Acetate |
| B | 5.00 | Isohexadecane | Isohexadecane |
| | 5.00 | Cosmacol ® EMI | Di-C12-13 Alkyl Malate |
| | 3.50 | Cetiol ® SN | Cetearyl Isononanoate |
| | 1.00 | Ganex ® V-220 | VP/Eicosene Copolymer |
| | 5.00 | T-Lite ® SF | Titanium Dioxide, Alumina |
| | | | Hydrate, |
| | | | Dimethicone/Methicone |
| | | | Copolymer |
| C | 59.20 | Water demin. | Aqua dem. |
| | 5.00 | Glycerin 87% | Glycerin |
| | 1.00 | Lanette E | Sodium Cetearyl Sulfate |
| | 0.30 | Keltrol ® | Xanthan Gum |
| | 1.00 | Keratin-binding domain-reactive dye | |
| | | 14_264 | |
| D | q.s. | Preservative | |
| A | 4.00 | Tego ® Care 450 | Polyglyceryl-3 Methyl Glucose |
| | | | Distearate |
| | 4.50 | Uvinul ® MC 80 | Ethylhexyl Methoxycinnamate |
| | 3.00 | Neo Heliopan ® OS | Octisalate |
| | 2.00 | Neo Heliopan ® HMS | Homosalate |
| | 0.50 | Vitamin E Acetate | Tocopheryl Acetate |
| B | 5.00 | Isohexadecane | Isohexadecane |
| | 5.00 | Cosmacol ® EMI | Di-C12-13 Alkyl Malate |
| | 3.50 | Cetiol ® SN | Cetearyl Isononanoate |
| | 1.00 | Ganex ® V-220 | VP/Eicosene Copolymer |
| | 5.00 | Z-COTE ® MAX | Zinc Oxide, Diphenyl Capryl |
| | | | Methicone |
| C | 60.15 | Water demin. | Aqua dem |
| | 5.00 | Glycerin 87% | Glycerin |
| | 1.00 | Lanette E | Sodium Cetearyl Sulfate |
| | 0.30 | Keltrol ® | Xanthan Gum |
| | 0.05 | Keratin-binding domain-reactive dye | |
| | | 14_264 | |
| D | q.s. | Preservative | |
| A | 4.00 | Tego ® Care 450 | Polyglyceryl-3 Methyl Glucose |
| | | | Distearate |
| | 4.50 | Uvinul ® N 539 T | Octocrylene |
| | 3.00 | Neo Heliopan ® OS | Octisalate |
| | 2.00 | Neo Heliopan ® HMS | Homosalate |
| | 0.50 | Vitamin E Acetate | Tocopheryl Acetate |
| B | 5.00 | Isohexadecane | Isohexadecane |
| | 5.00 | Cosmacol ® EMI | Di-C12-13 Alkyl Malate |
| | 3.50 | Cetiol ® SN | Cetearyl Isononanoate |
| | 1.00 | Ganex ® V-220 | VP/Eicosene Copolymer |
| | 5.00 | Z-COTE ® MAX | Zinc Oxide, Diphenyl Capryl |
| | | | Methicone |
| C | 60.19 | Water demin. | Aqua dem. |
| | 5.00 | Glycerin 87% | Glycerin |
| | 1.00 | Lanette E | Sodium Cetearyl Sulfate |
| | 0.30 | Keltrol ® | Xanthan Gum |
| | 0.01 | Keratin-binding domain-reactive dye | |
| | | 14_264 | |
| D | q.s. | Preservative | |
| A | 4.00 | Tego ® Care 450 | Polyglyceryl-3 Methyl Glucose |
| | | | Distearate |
| | 4.50 | Uvinul ® N 539 T | Octocrylene |
| | 3.00 | Neo Heliopan ® OS | Octisalate |
| | 2.00 | Neo Heliopan ® HMS | Homosalate |
| | 0.50 | Vitamin E Acetate | Tocopheryl Acetate |
| B | 5.00 | Isohexadecane | Isohexadecane |
| | 5.00 | Cosmacol ® EMI | Di-C12-13 Alkyl Malate |
| | 3.50 | Cetiol ® SN | Cetearyl Isononanoate |
| | 1.00 | Ganex ® V-220 | VP/Eicosene Copolymer |
| | 5.00 | T-Lite ® SF-S | Titanium Dioxide, Silica |
| | | | Hydrate, Alumina Hydrate, |
| | | | Methicone/Dimethicone |
| | | | Copolymer |
| C | 59.20 | Water demin. | Aqua dem. |
| | 5.00 | Glycerin 87% | Glycerin |
| | 1.00 | Lanette E | Sodium Cetearyl Sulfate |
| | 0.30 | Keltrol ® | Xanthan Gum |
| | 1.00 | Keratin-binding domain-reactive dye | |
| | | 14_264 | |
| D | q.s. | Preservative | |
| A | 8.00 | Cetiol ® B | Dibutyl Adipate |
| | 8.00 | Finsolv ® TN | C12-15 Alkyl Benzoate |
| | 12.00 | Myritol ® 331 | Cocoglycerides |
| | 1.00 | Lanette E | Sodium Cetearyl Sulfate |
| | 4.00 | Eumulgin ® VL 75 | Lauryl Glucoside, Polyglyceryl-2 |
| | | | Dipolyhydroxystearate, Glycerin |
| | 2.00 | Lanette O | Cetearyl Alcohol |
| | 3.00 | Tinosorb ® S | Bis-Ethylhexyloxyphenol |
| | | | Methoxyphenyl Triazine |
| | 1.00 | Vitamin E Acetate | Tocopheryl Acetate |
| B | 4.00 | Z-COTE ® MAX | Zinc Oxide, Diphenyl Capryl |
| | | | Methicone |
| C | 3.00 | Glycerin 87% | Glycerin |
| | 0.05 | Edeta BD | Disodium EDTA |
| | 0.20 | Allantoin | Allantoin |
| | 0.30 | Keltrol ® | Xanthan Gum |
| | 1.50 | Veegum Ultra | Magnesium Aluminum Silicate |
| | 49.45 | Water demin. | Aqua dem. |
| | 1.00 | Keratin-binding domain-reactive dye | |
| | | 14_264 | |
| D | q.s. | Preservative | |
| A | 8.00 | Cetiol ® B | Dibutyl Adipate |
| | 8.00 | Finsolv ® TN | C12-15 Alkyl Benzoate |
| | 12.00 | Myritol ® 331 | Cocoglycerides |
| | 1.00 | Lanette E | Sodium Cetearyl Sulfate |
| | 4.00 | Eumulgin ® VL 75 | Lauryl Glucoside, Polyglyceryl-2 |
| | | | Dipolyhydroxystearete, Glycerin |
| | 2.00 | Lanette O | Cetearyl Alcohol |
| | 3.00 | Tinosorb ® S | Bis-Ethylhexyloxyphenol |
| | | | Methoxyphenyl Triazine |
| | 1.00 | Vitamin E Acetate | Tocopheryl Acetate |
| B | 4.00 | T-Lite ® SF | Titanium Dioxide, Alumina |
| | | | Hydrate, Dimethicone/Methicone |
| | | | Copolymer |
| C | 3.00 | Glycerin 87% | Glycerin |
| | 0.05 | Edeta BD | Disodium EDTA |
| | 0.20 | Allantoin | Allantoin |
| | 0.30 | Keltrol ® | Xanthan Gum |
| | 1.50 | Veegum Ultra | Magnesium Aluminum Silicate |
| | 50.25 | Water demin. | Aqua dem. |
| D | 0.50 | Citric acid | Citric Acid |
| | q.s. | Perfume oil | |
| | 0.20 | Keratin-binding domain-reactive dye | |
| | | 14_264 | |
| | q.s. | Preservative | |
| A | 5.00 | Cosmacol ® EMI | Di-C12-13 Alkyl Malate |
| | 4.50 | Uvinul ® MC 80 | Ethylhexyl Methoxycinnamate |
| | 3.00 | Uvinul ® N 539 T | Octocrylene |
| | 2.00 | Uvinul ® T 150 | Ethylhexyl Triazone |
| B | 4.00 | Tego ® Care 450 | Polyglyceryl-3 Methyl Glucose |
| | | | Distearate |
| | 5.00 | Isohexadecane | Isohexadecane |
| | 3.50 | Cetiol ® SN | Cetearyl Isononanoate |
| | 0.50 | Vitamin E Acetate | Tocopheryl Acetate |
| | 1.00 | Ganex ® V-220 | VP/Eicosene Copolymer |
| | 2.50 | T-Lite ® SF | Titanium Dioxide, Alumina |
| | | | Hydrate, |
| | | | Dimethicone/Methicone |
| | | | Copolymer |
| C | 5.00 | Glycerin 87% | Glycerin |
| | 2.00 | Lanette E | Sodium Cetearyl Sulfate |
| | 0.30 | Keltrol ® | Xanthan Gum |
| | 1.00 | Pationic ® 138 C | Sodium Lauroyl Lactylate |
| | 1.00 | Pationic ® SSL | Sodium Stearoyl Lactylate |
| | 42.00 | Water demin. | Aqua dem |
| D | 5.00 | Eusolex ® 232 | Phenylbenzimidazole Sulfonic |
| | | | Acid |
| | 10.00 | Water demin. | Aqua dem |
| E | 0.70 | Sodium hydroxide | Sodium Hydroxide |
| | 1.00 | Keratin-binding domain-reactive dye | |
| | | 14_264 | |
| | q.s. | Preservative | |
| A | 5.00 | Cosmacol ® EMI | Di-C12-13 Alkyl Malate |
| | 4.50 | Uvinul ® MC 80 | Ethylhexyl Methoxycinnamate |
| | 3.00 | Uvinul ® N 539 T | Octocrylene |
| | 2.00 | Uvinul ® A Plus | Diethylamino Hydrobenzoyl |
| | | | Hexyl Benzoate |
| B | 4.00 | Tego ® Care 450 | Polyglyceryl-3 Methyl Glucose |
| | | | Distearate |
| | 5.00 | Isohexadecane | Isohexadecane |
| | 3.50 | Cetiol ® SN | Cetearyl Isononanoate |
| | 0.50 | Vitamin E Acetate | Tocopheryl Acetate |
| | 1.00 | Ganex ® V-220 | VP/Eicosene Copolymer |
| | 2.50 | T-Lite ® SF | Titanium Dioxide, Alumina |
| | | | Hydrate, |
| | | | Dimethicone/Methicone |
| | | | Copolymer |
| C | 5.00 | Glycerin 87% | Glycerin |
| | 2.00 | Lanette E | Sodium Cetearyl Sulfate |
| | 0.30 | Keltrol ® | Xanthan Gum |
| | 1.00 | Pationic ® 138 C | Sodium Lauroyl Lactylate |
| | 1.00 | Pationic ® SSL | Sodium Stearoyl Lactylate |
| | 41.00 | Water demin. | Aqua dem |
| D | 5.00 | Eusolex ® 232 | Phenylbenzimidazole Sulfonic |
| | | | Acid |
| | 2.00 | Keratin-binding domain-reactive dye | |
| | | 14_264 | |
| | 10.00 | Water demin. | Aqua dem |
| E | 0.70 | Sodium hydroxide | Sodium Hydroxide |
| | q.s. | Preservative | |
| A | 5.00 | Cosmacol ® EMI | Di-C12-13 Alkyl Malate |
| | 4.50 | Uvinul ® MC 80 | Ethylhexyl Methoxycinnamate |
| | 3.00 | Uvinul ® N 539 T | Octocrylene |
| | 2.00 | Uvinul ® A Plus | Diethylamino Hydrobenzoyl |
| | | | Hexyl Benzoate |
| B | 4.00 | Tego Care 450 | Polyglyceryl-3 Methyl Glucose |
| | | | Distearate |
| | 5.00 | Isohexadecane | Isohexadecane |
| | 3.50 | Cetiol ® SN | Cetearyl Isononanoate |
| | 0.50 | Vitamin E Acetate | Tocopheryl Acetate |
| | 1.00 | Ganex ® V-220 | VP/Eicosene Copolymer |
| | 2.50 | Z-COTE ® MAX | Zinc Oxide, Diphenyl Capryl |
| | | | Methicone |
| C | 5.00 | Glycerin 87% | Glycerin |
| | 2.00 | Lanette E | Sodium Cetearyl Sulfate |
| | 0.30 | Keltrol ® | Xanthan Gum |
| | 1.00 | Pationic ® 138 C | Sodium Lauroyl Lactylate |
| | 1.00 | Pationic ® SSL | Sodium Stearoyl Lactylate |
| | 42.50 | Water demin. | Aqua dem |
| D | 5.00 | Eusolex ® 232 | Phenylbenzimidazole Sulfonic |
| | | | Acid |
| | 0.50 | Keratin-binding domain-reactive dye | |
| | | 14_264 | |
| | 10.00 | Water demin. | Aqua dem |
| E | 0.70 | Sodium hydroxide | Sodium Hydroxide |
| | q.s. | Preservative | |
| A | 5.00 | Cosmacol ® EMI | Di-C12-13 Alkyl Malate |
| | 7.50 | Uvinul ® N 539 T | Octocrylene |
| | 2.00 | Mexoryl ® XL | Drometrizole Trisiloxane |
| B | 4.00 | Tego ® Care 450 | Polyglyceryl-3 Methyl Glucose |
| | | | Distearate |
| | 5.00 | Isohexadecane | Isohexadecane |
| | 3.50 | Cetiol ® SN | Cetearyl Isononanoate |
| | 0.50 | Vitamin E Acetate | Tocopheryl Acetate |
| | 1.00 | Ganex ® V-220 | VP/Eicosene Copolymer |
| | 5.00 | Z-COTE ® MAX | Zinc Oxide, Diphenyl Capryl |
| | | | Methicone |
| C | 5.00 | Glycerin 87% | Glycerin |
| | 2.00 | Lanette E | Sodium Cetearyl Sulfate |
| | 0.30 | Keltrol ® | Xanthan Gum |
| | 1.00 | Pationic ® 138 C | Sodium Lauroyl Lactylate |
| | 1.00 | Pationic ® SSL | Sodium Stearoyl Lactylate |
| | 40.50 | Water demin. | Aqua dem |
| D | 5.00 | Eusolex ® 232 | Phenylbenzimidazole Sulfonic |
| | | | Acid |
| | 1.00 | Keratin-binding domain-reactive dye | |
| | | 14_264 | |
| | 10.00 | Water demin. | Aqua dem |
| E | 0.70 | Sodium hydroxide | Sodium Hydroxide |
| | q.s. | Preservative | |
| A | 5.00 | Cosmacol ® EMI | Di-C12-13 Alkyl Malate |
| | 5.50 | Uvinul ® N 539 T | Octocrylene |
| | 2.00 | Uvinul ® A Plus | Diethylamino Hydrobenzoyl |
| | | | Hexyl Benzoate |
| | 2.00 | Mexoryl ® XL | Drometrizole Trisiloxane |
| B | 4.00 | Tego ® Care 450 | Polyglyceryl-3 Methyl Glucose |
| | | | Distearate |
| | 5.00 | Isohexadecane | Isohexadecane |
| | 3.50 | Cetiol ® SN | Cetearyl Isononanoate |
| | 0.50 | Vitamin E Acetate | Tocopheryl Acetate |
| | 1.00 | Ganex ® V-220 | VP/Eicosene Copolymer |
| | 5.00 | Z-COTE ® MAX | Zinc Oxide, Diphenyl Capryl |
| | | | Methicone |
| C | 5.00 | Glycerin 87% | Glycerin |
| | 2.00 | Lanette E | Sodium Cetearyl Sulfate |
| | 0.30 | Keltrol ® | Xanthan Gum |
| | 1.00 | Pationic ® 138 C | Sodium Lauroyl Lactylate |
| | 1.00 | Pationic ® SSL | Sodium Stearoyl Lactylate |
| | 41.50 | Water demin. | Aqua dem |
| D | 5.00 | Eusolex ® 232 | Phenylbenzimidazole Sulfonic |
| | | | Acid |
| | 0.50 | Keratin-binding domain-reactive dye | |
| | | 14_264 | |
| | 9.50 | Water demin. | Aqua dem |
| E | 0.70 | Sodium hydroxide | Sodium Hydroxide |
| | q.s. | Preservative | |
| A | 5.00 | Cosmacol ® EMI | Di-C12-13 Alkyl Malate |
| | 5.50 | Uvinul ® N 539 T | Octocrylene |
| | 2.00 | Uvinul ® A Plus | Diethylamino Hydrobenzoyl |
| | | | Hexyl Benzoate |
| | 2.00 | Mexoryl ® XL | Drometrizole Trisiloxane |
| B | 4.00 | Tego Care ® 450 | Polyglyceryl-3 Methyl Glucose |
| | | | Distearate |
| | 5.00 | Isohexadecane | Isohexadecane |
| | 3.50 | Cetiol ® SN | Cetearyl Isononanoate |
| | 0.50 | Vitamin E Acetate | Tocopheryl Acetate |
| | 1.00 | Ganex ® V-220 | VP/Eicosene Copolymer |
| | 5.00 | T-Lite ® SF-S | Titanium Dioxide, Silica |
| | | | Hydrate, Alumina Hydrate, |
| | | | Methicone/Dimethicone |
| | | | Copolymer |
| C | 5.00 | Glycerin 87% | Glycerin |
| | 2.00 | Lanette E | Sodium Cetearyl Sulfate |
| | 0.30 | Keltrol ® | Xanthan Gum |
| | 1.00 | Pationic ® 138 C | Sodium Lauroyl Lactylate |
| | 1.00 | Pationic ® SSL | Sodium Stearoyl Lactylate |
| | 40.50 | Water demin. | Aqua dem |
| D | 5.00 | Eusolex ® 232 | Phenylbenzimidazole Sulfonic |
| | | | Acid |
| | 1.00 | Keratin-binding domain-reactive dye | |
| | | 14_264 | |
| | 10.00 | Water demin. | Aqua dem |
| E | 0.70 | Sodium hydroxide | Sodium Hydroxide |
| | q.s. | Preservative | |
| A | 8.00 | Cetiol ® B | Dibutyl Adipate |
| | 8.00 | Finsolv ® TN | C12-15 Alkyl Benzoate |
| | 10.00 | Myritol ® 331 | Cocoglycerides |
| | 1.00 | Lanette E | Sodium Cetearyl Sulfate |
| | 4.00 | Eumulgin ® VL 75 | Lauryl Glucoside, Polyglyceryl-2 |
| | | | Dipolyhydroxystearate, Glycerin |
| | 2.00 | Lanette O | Cetearyl Alcohol |
| | 1.00 | Tinosorb ® S | Bis-Ethylhexyloxyphenol |
| | | | Methoxyphenyl Triazine |
| | 1.00 | Uvinul ® T 150 | Ethylhexyl Triazone |
| | 1.00 | Vitamin E Acetate | Tocopheryl Acetate |
| B | 5.00 | T-Lite ® SF | Titanium Dioxide, Alumina |
| | | | Hydrate, |
| | | | Dimethicone/Methicone |
| | | | Copolymer |
| C | 3.00 | Glycerin 87% | Glycerin |
| | 0.05 | Edeta BD | Disodium EDTA |
| | 0.20 | Allantoin | Allantoin |
| | 0.30 | Keltrol ® | Xanthan Gum |
| | 2.00 | Keratin-binding domain-reactive dye | |
| | | 14_264 | |
| | 1.50 | Veegum Ultra | Magnesium Aluminum Silicate |
| | 51.95 | Water demin. | Aqua dem |
| D | q.s. | Perfume oil | |
| | q.s. | Preservative | |
| A | 8.00 | Cetiol ® B | Dibutyl Adipate |
| | 8.00 | Finsolv ® TN | C12-15 Alkyl Benzoate |
| | 10.00 | Myritol ® 331 | Cocoglycerides |
| | 1.00 | Lanette E | Sodium Cetearyl Sulfate |
| | 4.00 | Eumulgin ® VL 75 | Lauryl Glucoside, Polyglyceryl-2 |
| | | | Dipolyhydroxystearate, Glycerin |
| | 2.00 | Lanette O | Cetearyl Alcohol |
| | 1.00 | Tinosorb ® S | Bis-Ethylhexyloxyphenol |
| | | | Methoxyphenyl triazine |
| | 1.00 | Uvinul ® T 150 | Ethylhexyl Triazone |
| | 1.00 | Vitamin E Acetate | Tocopheryl Acetate |
| B | 5.00 | Z-COTE ® MAX | Zinc Oxide, Diphenyl Capryl |
| | | | Methicone |
| C | 3.00 | Glycerin 87% | Glycerin |
| | 0.05 | Edeta BD | Disodium EDTA |
| | 0.20 | Allantoin | Allantoin |
| | 0.30 | Keltrol ® | Xanthan Gum |
| | 1.00 | Keratin-binding domain-reactive dye | |
| | | 14_264 | |
| | 1.50 | Veegum Ultra | Magnesium Aluminum Silicate |
| | 52.95 | Water demin. | Aqua dem. |
| D | q.s. | Perfume oil | |
| | q.s. | Preservative | |
| A | 3.00 | Glycerin 87% | Glycerin |
| | 0.20 | Edeta BD | Disodium EDTA |
| | 0.30 | Abiol | Imidazolidinyl Urea |
| | 1.00 | Plantacare ® 2000 | Decyl Glucoside |
| | 0.30 | Keltrol ® T | Xanthan Gum |
| | 57.00 | Water demin. | Aqua dem. |
| B | 5.00 | T-Lite ® SF-S | Titanium Dioxide, Silica |
| | | | Hydrate, Alumina Hydrate, |
| | | | Methicone/Dimethicone |
| | | | Copolymer |
| C | 7.50 | Uvinul ® MC 80 | Ethylhexyl Methoxycinnamate |
| | 2.00 | Uvinul ® A Plus | Diethylamino Hydroxybenzoyl |
| | | | Hexyl Benzoate |
| | 2.00 | Dow Corning ® 345 Fluid | Cyclopentasiloxane, |
| | | | Cyclohexasiloxane |
| | 3.50 | Cremophor ® A 6 | Ceteareth-6, Stearyl Alcohol |
| | 1.50 | Cremophor ® A 25 | Ceteareth-25 |
| | 0.50 | Beeswax 3044 PH | Beeswax |
| | 3.00 | Lanette O | Cetearyl Alcohol |
| | 10.00 | Miglyol ® 812 | Caprylic/Capric Triglyceride |
| D | 1.00 | Vitamin E Acetate | Tocopheryl Acetate |
| | 2.00 | Keratin-binding domain-reactive dye | |
| | | 14_264 | |
| | 0.20 | Bisabolol rac. | Bisabolol |
| A | 3.00 | Glycerin 87% | Glycerin |
| | 0.20 | Edeta BD | Disodium EDTA |
| | 0.30 | Abiol | Imidazolidinyl Urea |
| | 1.00 | Plantacare 2000 | Decyl Glucoside |
| | 0.30 | Keltrol ® T | Xanthan Gum |
| | 58.00 | Water demin. | Aqua dem. |
| B | 5.00 | Z-COTE ® MAX | Zinc Oxide, Diphenyl Capryl |
| | | | Methicone |
| C | 7.50 | Uvinul ® MC 80 | Ethylhexyl Methoxycinnamate |
| | 2.00 | Uvinul ® A Plus | Diethylamino Hydroxybenzoyl |
| | | | Hexyl Benzoate |
| | 2.00 | Dow Corning ® 345 Fluid | Cyclopentasiloxane, |
| | | | Cyclohexasiloxane |
| | 3.50 | Cremophor ® A 6 | Ceteareth-6, Stearyl Alcohol |
| | 1.50 | Cremophor ® A 25 | Ceteareth-25 |
| | 0.50 | Beeswax 3044 PH | Beeswax |
| | 3.00 | Lanette O | Cetearyl Alcohol |
| | 10.00 | Miglyol ® 812 | Caprylic/Capric Triglyceride |
| D | 1.00 | Vitamin E Acetate | Tocopheryl Acetate |
| | 1.00 | Keratin-binding domain-reactive dye | |
| | | 14_264 | |
| | 0.20 | Bisabolol rac. | Bisabolol |
| A | 3.00 | Glycerin 87% | Glycerin |
| | 0.20 | Edeta BD | Disodium EDTA |
| | 0.30 | Abiol | Imidazolidinyl Urea |
| | 1.00 | Plantacare ® 2000 | Decyl Glucoside |
| | 0.30 | Keltrol ® T | Xanthan Gum |
| | 58.50 | Water demin. | Aqua dem. |
| B | 5.00 | T-Lite ® SF-S | Titanium Dioxide, Silica |
| | | | Hydrate, Alumina Hydrate, |
| | | | Methicone/Dimethicone |
| | | | Copolymer |
| C | 7.50 | Uvinul ® MC 80 | Ethylhexyl Methoxycinnamate |
| | 5.00 | Uvinul ® N 539 T | Octocrylene |
| | 2.00 | Parsol ® 1789 | Butyl |
| | | | Methoxydibenzoylmethane |
| | 2.00 | Dow Corning ® 345 Fluid | Cyclopentasiloxane, |
| | | | Cyclohexasiloxane |
| | 3.50 | Cremophor ® A 6 | Ceteareth-6, Stearyl Alcohol |
| | 1.50 | Cremophor ® A 25 | Ceteareth-25 |
| | 0.50 | Beeswax 3044 PH | Beeswax |
| | 3.00 | Lanette O | Cetearyl Alcohol |
| | 10.00 | Miglyol ® 812 | Caprylic/Capric Triglyceride |
| D | 1.00 | Vitamin E Acetate | Tocopheryl Acetate |
| | 0.50 | Keratin-binding domain-reactive dye | |
| | | 14_264 | |
| | 0.20 | Bisabolol rac. | Bisabolol |
| A | 3.00 | Glycerin 87% | Glycerin |
| | 0.20 | Edeta BD | Disodium EDTA |
| | 0.30 | Abiol | Imidazolidinyl Urea |
| | 1.00 | Plantacare 2000 | Decyl Glucoside |
| | 0.30 | Keltrol ® T | Xanthan Gum |
| | 2.00 | Mexoryl ® SL | Terephthalidene Dicamphor |
| | | | Sulfonic Acid |
| | 58.40 | Water demin. | Aqua dem. |
| B | 6.00 | T-Lite ® SF-S | Titanium Dioxide, Silica |
| | | | Hydrate, Alumina Hydrate, |
| | | | Methicone/Dimethicone |
| | | | Copolymer |
| | 6.00 | Uvinul ® N 539 T | Octocrylene |
| | 2.00 | Parsol ® 1789 | Butyl |
| | | | Methoxydibenzoylmethane |
| | 2.00 | Dow Corning ® 345 Fluid | Cyclopentasiloxane, |
| | | | Cyclohexasiloxane |
| | 3.50 | Cremophor ® A 6 | Ceteareth-6, Stearyl Alcohol |
| | 1.50 | Cremophor ® A 25 | Ceteareth-25 |
| | 0.50 | Beeswax 3044 PH | Beeswax |
| | 3.00 | Lanette O | Cetearyl Alcohol |
| | 10.00 | Miglyol 812 | Caprylic/Capric Triglyceride |
| D | 1.00 | Vitamin E Acetate | Tocopheryl Acetate |
| | 0.10 | Keratin-binding domain-reactive dye | |
| | | 14_264 | |
| | 0.20 | Bisabolol rac. | Bisabolol |
| A | 3.00 | Glycerin 87% | Glycerin |
| | 0.20 | Edeta BD | Disodium EDTA |
| | 0.30 | Abiol | Imidazolidinyl Urea |
| | 1.00 | Plantacare ® 2000 | Decyl Glucoside |
| | 0.30 | Keltrol ® T | Xanthan Gum |
| | 2.00 | Mexoryl ® SL | Terephthalidene Dicamphor |
| | | | Sulfonic Acid |
| | 58.45 | Water demin. | Aqua dem. |
| B | 6.00 | Z-COTE ® MAX | Zinc Oxide, Diphenyl Capryl |
| | | | Methicone |
| | 6.00 | Uvinul ® N 539 T | Octocrylene |
| | 2.00 | Parsol ® 1789 | Butyl |
| | | | Methoxydibenzoylmethane |
| | 2.00 | Dow Corning ® 345 Fluid | Cyclopentasiloxane, |
| | | | Cyclohexasiloxane |
| | 3.50 | Cremophor ® A 6 | Ceteareth-6, Stearyl Alcohol |
| | 1.50 | Cremophor ® A 25 | Ceteareth-25 |
| | 0.50 | Beeswax 3044 PH | Beeswax |
| | 3.00 | Lanette O | Cetearyl Alcohol |
| | 10.00 | Miglyol 812 | Caprylic/Capric Triglyceride |
| D | 1.00 | Vitamin E Acetate | Tocopheryl Acetate |
| | 0.05 | Keratin-binding domain-reactive dye | |
| | | 14_264 | |
| | 0.20 | Bisabolol rac. | Bisabolol |
| A | 3.00 | Glycerin 87% | Glycerin |
| | 0.20 | Edeta BD | Disodium EDTA |
| | 0.30 | Abiol | Imidazolidinyl Urea |
| | 1.00 | Plantacare ® 2000 | Decyl Glucoside |
| | 0.30 | Keltrol ® T | Xanthan Gum |
| | 2.00 | Neo Heliopan ® AP | Disodium Phenyl |
| | | | Dibenzimidazole Tetrasulfonate |
| | 57.50 | Water demin. | Aqua dem. |
| B | 6.00 | Z-COTE ® MAX | Zinc Oxide, Diphenyl Capryl |
| | | | Methicone |
| | 6.00 | Uvinul ® N 539 T | Octocrylene |
| | 2.00 | Parsol ® 1789 | Butyl |
| | | | Methoxydibenzoylmethane |
| | 2.00 | Dow Corning ® 345 Fluid | Cyclopentasiloxane, |
| | | | Cyclohexasiloxane |
| | 3.50 | Cremophor ® A 6 | Ceteareth-6, Stearyl Alcohol |
| | 1.50 | Cremophor ® A 25 | Ceteareth-25 |
| | 0.50 | Beeswax 3044 PH | Beeswax |
| | 3.00 | Lanette O | Cetearyl Alcohol |
| | 10.00 | Miglyol 812 | Caprylic/Capric Triglyceride |
| D | 1.00 | Vitamin E Acetate | Tocopheryl Acetate |
| | 1.00 | Keratin-binding domain-reactive dye | |
| | | 14_264 | |
| | 0.20 | Bisabolol rac. | Bisabolol |
| A | 25.00 | Dow Corning ® 345 Fluid | Cyclopentasiloxane, |
| | | | Cyclohexasiloxane |
| | 20.00 | Dow Corning ® 245 Fluid | Cyclopentasiloxane |
| | 8.00 | Uvinul ® MC 80 | Ethylhexyl Methoxycinnamate |
| | 4.00 | Abil ® EM 90 | Cetyl PEG/PPG-10/1 |
| | | | Dimethicone |
| | 7.00 | T-Lite ® SF | Titanium Dioxide, Alumina |
| | | | Hydrate, |
| | | | Dimethicone/Methicone |
| | | | Copolymer |
| B | 17.00 | Ethanol 95% | Alcohol |
| | 10.00 | Z-COTE ® MAX | Zinc Oxide, Diphenyl Capryl |
| | | | Methicone |
| | 4.50 | Water demin. | Aqua dem. |
| | 3.00 | Glycerin 87% | Glycerin |
| | 0.50 | Keratin-binding domain-reactive dye | |
| | | 14_264 | |
| | 1.00 | Talc | Talc |
| A | 25.00 | Dow Corning ® 345 Fluid | Cyclopentasiloxane, |
| | | | Cyclohexasiloxane |
| | 20.00 | Dow Corning ® 245 Fluid | Cyclopentasiloxane |
| | 8.00 | Uvinul ® MC 80 | Ethylhexyl Methoxycinnamate |
| | 4.00 | Abil ® EM 90 | Cetyl PEG/PPG-10/1 |
| | | | Dimethicone |
| | 7.00 | T-Lite ® SF-S | Titanium Dioxide, Silica |
| | | | Hydrate, Alumina Hydrate, |
| | | | Methicone/Dimethicone |
| | | | Copolymer |
| B | 17.00 | Ethanol 95% | Alcohol |
| | 9.99 | Z-COTE ® MAX | Zinc Oxide, Diphenyl Capryl |
| | | | Methicone |
| | 5.00 | Water demin. | Aqua dem. |
| | 3.00 | Glycerin 87% | Glycerin |
| | 0.01 | Keratin-binding domain-reactive dye | |
| | | 14_264 | |
| | 1.00 | Talc | Talc |
| A | 20.00 | Dow Corning ® 345 Fluid | Cyclopentasiloxane, |
| | | | Cyclohexasiloxane |
| | 10.00 | Dow Corning ® 245 Fluid | Cyclopentasiloxane |
| | 7.50 | Uvinul ® MC 80 | Ethylhexyl Methoxycinnamate |
| | 2.00 | Uvinul ® T 150 | Ethylhexyl Triazone |
| | 12.00 | Cosmacol ® EMI | Di-C12-13 Alkyl Malate |
| | 4.00 | Abil ® EM 90 | Cetyl PEG/PPG-10/1 |
| | | | Dimethicone |
| B | 7.00 | T-Lite ® SF | Titanium Dioxide, Alumina |
| | | | Hydrate, |
| | | | Dimethicone/Methicone |
| | | | Copolymer |
| C | 15.00 | Ethanol 95% | Alcohol |
| | 10.00 | Z-COTE ® MAX | Zinc Oxide, Diphenyl Capryl |
| | | | Methicone |
| | 3.00 | Glycerin 87% | Glycerin |
| | 1.50 | Keratin-binding domain-reactive dye | |
| | | 14_264 | |
| | 8.00 | Water demin. | Aqua dem. |
| A | 20.00 | Dow Corning ® 345 Fluid | Cyclopentasiloxane, |
| | | | Cyclohexasiloxane |
| | 10.00 | Dow Corning ® 245 Fluid | Cyclopentasiloxane |
| | 7.50 | Uvinul ® MC 80 | Ethylhexyl Methoxycinnamate |
| | 2.00 | Tinosorb ® S | Bis-Ethylhexyloxyphenol |
| | | | Methoxyphenyl Triazine |
| | 12.00 | Cosmacol ® EMI | Di-C12-13 Alkyl Malate |
| | 4.00 | Abil ® EM 90 | Cetyl PEG/PPG-10/1 |
| | | | Dimethicone |
| B | 7.00 | T-Lite ® SF | Titanium Dioxide, Alumina |
| | | | Hydrate, |
| | | | Dimethicone/Methicone |
| | | | Copolymer |
| C | 15.00 | Ethanol 95% | Alcohol |
| | 10.00 | Z-COTE ® MAX | Zinc Oxide, Diphenyl Capryl |
| | | | Methicone |
| | 3.00 | Glycerin 87% | Glycerin |
| | 0.50 | Keratin-binding domain-reactive dye | |
| | | 14_264 | |
| | 9.00 | Water demin. | Aqua dem. |
| A | 2.00 | Cremophor ® WO 7 | PEG-7 Hydrogenated Castor Oil |
| | 6.00 | Abil ® B 8839 | Cyclopentasiloxane, |
| | | | Cyclohexasiloxane |
| | 3.00 | T-Lite ® SF | Titanium Dioxide, Alumina |
| | | | Hydrate, |
| | | | Dimethicone/Methicone |
| | | | Copolymer |
| | 4.00 | Isopropyl Palmitate | Isopropyl Palmitate |
| | 1.00 | Abil ® 350 | Dimethicone |
| B | 7.00 | Uvinul ® MC 80 | Ethylhexyl Methoxycinnamate |
| | 1.00 | Uvinul ® T 150 | Ethylhexyl Triazone |
| | 7.00 | Finsolv ® TN | C12-15 Alkyl Benzoate |
| | 4.00 | Abil ® WE 09 | Polyglyceryl-4 Isostearate, Cetyl |
| | | | PEG/PPG-10/1 Dimethicone, |
| | | | Hexyl Laurate |
| C | 0.50 | Sodium chloride | Sodium Chloride |
| | 0.20 | Edeta BD | Disodium EDTA |
| | 61.30 | Water demin. | Aqua dem |
| D | 1.00 | Vitamin E Acetate | Tocopheryl Acetate |
| | 1.00 | Keratin-binding domain-reactive dye | |
| | | 14_264 | |
| | q.s. | Preservative | |
| A | 2.00 | Cremophor ® WO 7 | PEG-7 Hydrogenated Castor Oil |
| | 6.00 | Abil ® B 8839 | Cyclopentasiloxane, |
| | | | Cyclohexasiloxane |
| | 3.00 | Z-COTE ® MAX | Zinc Oxide, Diphenyl Capryl |
| | | | Methicone |
| | 4.00 | Isopropyl Palmitate | Isopropyl Palmitate |
| | 1.00 | Abil ® 350 | Dimethicone |
| B | 7.00 | Uvinul ® MC 80 | Ethylhexyl Methoxycinnamate |
| | 1.00 | Uvinul ® T 150 | Ethylhexyl Triazone |
| | 7.00 | Finsolv ® TN | C12-15 Alkyl Benzoate |
| | 4.00 | Abil ® WE 09 | Polyglyceryl-4 Isostearate, Cetyl |
| | | | PEG/PPG-10/1 Dimethicone, |
| | | | Hexyl Laurate |
| C | 0.50 | Sodium chloride | Sodium Chloride |
| | 0.20 | Edeta BD | Disodium EDTA |
| | 62.20 | Water demin. | Aqua dem |
| D | 1.00 | Vitamin E Acetate | Tocopheryl Acetate |
| | 0.10 | Keratin-binding domain-reactive dye | |
| | | 14_264 | |
| | q.s. | Preservative | |
| A | 2.00 | Cremophor ® WO 7 | PEG-7 Hydrogenated Castor Oil |
| | 6.00 | Abil ® B 8839 | Cyclopentasiloxane, |
| | | | Cyclohexasiloxane |
| | 3.00 | Z-COTE ® MAX | Zinc Oxide, Diphenyl Capryl |
| | | | Methicone |
| | 4.00 | Isopropyl Palmitate | Isopropyl Palmitate |
| | 1.00 | Abil ® 350 | Dimethicone |
| B | 7.00 | Uvinul ® MC 80 | Ethylhexyl Methoxycinnamate |
| | 1.00 | Tinosorb ® S | Bis-Ethylhexyloxyphenol |
| | | | Methoxyphenyl Triazine |
| | 7.00 | Finsolv ® TN | C12-15 Alkyl Benzoate |
| | 4.00 | Abil ® WE 09 | Polyglyceryl-4 Isostearate, Cetyl |
| | | | PEG/PPG-10/1 Dimethicone, |
| | | | Hexyl Laurate |
| C | 0.50 | Sodium chloride | Sodium Chloride |
| | 0.20 | Edeta BD | Disodium EDTA |
| | 60.30 | Water demin. | Aqua dem |
| D | 1.00 | Vitamin E Acetate | Tocopheryl Acetate |
| | 2.00 | Keratin-binding domain-reactive dye | |
| | | 14_264 | |
| | q.s. | Preservative | |
| A | 2.00 | Cremophor ® WO 7 | PEG-7 Hydrogenated Castor Oil |
| | 6.00 | Abil ® B 8839 | Cyclopentasiloxane, |
| | | | Cyclohexasiloxane |
| | 6.00 | Z-COTE ® MAX | Zinc Oxide, Diphenyl Capryl |
| | | | Methicone |
| | 4.00 | Isopropyl Palmitate | Isopropyl Palmitate |
| | 1.00 | Abil ® 350 | Dimethicone |
| B | 4.00 | Uvinul ® N 539 T | Octocrylene |
| | 1.00 | Tinosorb ® S | Bis-Ethylhexyloxyphenol |
| | | | Methoxyphenyl Triazine |
| | 7.00 | Finsolv ® TN | C12-15 Alkyl Benzoate |
| | 4.00 | Abil ® WE 09 | Polyglyceryl-4 Isostearate, Cetyl |
| | | | PEG/PPG-10/1 Dimethicone, |
| | | | Hexyl Laurate |
| C | 0.50 | Sodium chloride | Sodium Chloride |
| | 0.20 | Edeta BD | Disodium EDTA |
| | 62.10 | Water demin. | Aqua dem |
| D | 1.00 | Vitamin E Acetate | Tocopheryl Acetate |
| | 0.20 | Keratin-binding domain-reactive dye | |
| | | 14_264 | |
| | q.s. | Preservative | |
| A | 2.00 | Cremophor ® WO 7 | PEG-7 Hydrogenated Castor Oil |
| | 6.00 | Abil ® B 8839 | Cyclopentasiloxane, |
| | | | Cyclohexasiloxane |
| | 6.00 | Z-COTE ® MAX | Zinc Oxide, Diphenyl Capryl |
| | | | Methicone |
| | 4.00 | Isopropyl Palmitate | Isopropyl Palmitate |
| | 1.00 | Abil ® 350 | Dimethicone |
| B | 3.00 | Uvinul ® N 539 T | Octocrylene |
| | 1.00 | Mexoryl ® XL | Drometrizole Trisiloxane |
| | 1.00 | Tinosorb ® S | Bis-Ethylhexyloxyphenol |
| | | | Methoxyphenyl Triazine |
| | 7.00 | Finsolv ® TN | C12-15 Alkyl Benzoate |
| | 4.00 | Abil ® WE 09 | Polyglyceryl-4 Isostearate, Cetyl |
| | | | PEG/PPG-10/1 Dimethicone, |
| | | | Hexyl Laurate |
| C | 0.50 | Sodium chloride | Sodium Chloride |
| | 0.20 | Edeta BD | Disodium EDTA |
| | 1.00 | Keratin-binding domain-reactive dye | |
| | | 14_264 | |
| | 61.30 | Water demin. | Aqua dem |
| D | 1.00 | Vitamin E Acetate | Tocopheryl Acetate |
| | q.s. | Preservative | |
| A | 2.00 | Cremophor ® WO 7 | PEG-7 Hydrogenated Castor Oil |
| | 6.00 | Abil ® B 8839 | Cyclopentasiloxane, |
| | | | Cyclohexasiloxane |
| | 6.00 | T-Lite ® SF-S | Titanium Dioxide, Silica |
| | | | Hydrate, Alumina Hydrate, |
| | | | Methicone/Dimethicone |
| | | | Copolymer |
| | 4.00 | Isopropyl Palmitate | Isopropyl Palmitate |
| | 1.00 | Abil ® 350 | Dimethicone |
| B | 3.00 | Uvinul ® N 539 T | Octocrylene |
| | 1.00 | Mexoryl ® XL | Drometrizole trisiloxane |
| | 1.00 | Tinosorb ® S | Bis-Ethylhexyloxyphenol |
| | | | Methoxyphenyl Triazine |
| | 7.00 | Finsolv ® TN | C12-15 Alkyl Benzoate |
| | 4.00 | Abil ® WE 09 | Polyglyceryl-4 Isostearate, Cetyl |
| | | | PEG/PPG-10/1 Dimethicone, |
| | | | Hexyl Laurate |
| C | 0.50 | Sodium chloride | Sodium Chloride |
| | 0.20 | Edeta BD | Disodium EDTA |
| | 61.80 | Water demin. | Aqua dem |
| D | 1.00 | Vitamin E Acetate | Tocopheryl Acetate |
| | 0.5% | Keratin-binding domain-reactive dye 14_264 | |
| | q.s. | Preservative | |
| A | 4.50 | Uvinul ® MC 80 | Ethylhexyl Methoxycinnamate |
| | 3.00 | Uvinul ® N 539 T | Octocrylene |
| | 1.00 | Uvinul ® T 150 | Ethylhexyl Triazone |
| | 2.50 | Cosmacol ® EMI | Di-C12-13 Alkyl Malate |
| B | 0.50 | Vitamin E Acetate | Tocopheryl Acetate |
| | 4.00 | Tego Care ® 450 | Polyglyceryl-3 Methyl Glucose |
| | | | Distearate |
| C | 3.50 | Cetiol ® SN | Cetearyl Isononanoate |
| | 1.00 | Ganex ® V-220 | VP/Eicosene Copolymer |
| | 5.00 | Isohexadecane | Isohexadecane |
| | 2.50 | Cosmacol ® EMI | Di-C12-13 Alkyl Malate |
| | 5.00 | Z-COTE ® MAX | Zinc Oxide, Diphenyl Capryl |
| | | | Methicone |
| D | 44.00 | Water demin. | Aqua dem. |
| | 5.00 | Glycerin 87% | Glycerin |
| | 1.00 | Lanette E | Sodium Cetearyl Sulfate |
| | 15.00 | Luviquat ® Care | Polyquaternium-44 |
| | 1.00 | Keratin-binding domain-reactive dye | |
| | | 14_264 | |
| | 0.50 | Keltrol ® | Xanthan Gum |
| E | 1.00 | Phenonip | Phenoxyethanol, |
| | | | Methylparaben, Ethylparaben, |
| | | | Butylparaben, Propylparaben, |
| | | | Isobutylparaben |
| A | 4.50 | Uvinul ® MC 80 | Ethylhexyl Methoxycinnamate |
| | 3.00 | Uvinul ® N 539 T | Octocrylene |
| | 1.00 | Tinosorb ® S | Bis-Ethoxylhexyloxyphenol |
| | | | Methoxyphenyl Triazine |
| | 2.50 | Cosmacol ® EMI | Di-C12-13 Alkyl Malate |
| B | 0.50 | Vitamin E Acetate | Tocopheryl Acetate |
| | 4.00 | Tego Care ® 450 | Polyglyceryl-3 Methyl Glucose |
| | | | Distearate |
| C | 3.50 | Cetiol ® SN | Cetearyl Isononanoate |
| | 1.00 | Ganex ® V-220 | VP/Eicosene Copolymer |
| | 5.00 | Isohexadecane | Isohexadecane |
| | 2.50 | Cosmacol ® EMI | Di-C12-13 Alkyl Malate |
| | 5.00 | Z-COTE ® MAX | Zinc Oxide, Diphenyl Capryl |
| | | | Methicone |
| D | 44.90 | Water demin. | Aqua dem. |
| | 5.00 | Glycerin 87% | Glycerin |
| | 1.00 | Lanette E | Sodium Cetearyl Sulfate |
| | 15.00 | Luviquat Care | Polyquaternium-44 |
| | 0.10 | Keratin-binding domain-reactive dye | |
| | | 14_264 | |
| | 0.50 | Keltrol ® | Xanthan Gum |
| E | 1.00 | Phenonip | Phenoxyethanol, |
| | | | Methylparaben, Ethylparaben, |
| | | | Butylparaben, Propylparaben, |
| | | | Isobutylparaben |
| A | 1.50 | Mexoryl ® XL | Drometrizole Trisoloxane |
| | 5.00 | Uvinul ® N 539 T | Octocrylene |
| | 1.00 | Tinosorb ® S | Bis-Ethylhexyloxyphenol |
| | | | Methoxyphenyl Triazine |
| | 2.50 | Cosmacol ® EMI | Di-C12-13 Alkyl Malate |
| B | 0.50 | Vitamin E Acetate | Tocopheryl Acetate |
| | 4.00 | Tego Care ® 450 | Polyglyceryl-3 Methyl Glucose |
| | | | Distearate |
| C | 3.50 | Cetiol ® SN | Cetearyl Isononanoate |
| | 1.00 | Ganex ® V-220 | VP/Eicosene Copolymer |
| | 5.00 | Isohexadecane | Isohexadecane |
| | 2.50 | Cosmacol ® EMI | Di-C12-13 Alkyl Malate |
| | 5.00 | Z-COTE ® MAX | Zinc Oxide, Diphenyl Capryl |
| | | | Methicone |
| D | 44.50 | Water demin. | Aqua dem. |
| | 5.00 | Glycerin 87% | Glycerin |
| | 1.00 | Lanette E | Sodium Cetearyl Sulfate |
| | 15.00 | Luviquat ® Care | Polyquaternium-44 |
| | 1.50 | Keratin-binding domain-reactive dye | |
| | | 14_264 | |
| | 0.50 | Keltrol ® | Xanthan Gum |
| E | 1.00 | Phenonip | Phenoxyethanol, |
| | | | Methylparaben, Ethylparaben, |
| | | | Butylparaben, Propylparaben, |
| | | | Isobutylparaben |
| A | 1.50 | Mexoryl ® XL | Drometrizole Trisoloxane |
| | 5.00 | Uvinul ® N 539 T | Octocrylene |
| | 1.00 | Tinosorb ® S | Bis-Ethylhexyloxyphenol |
| | | | Methoxyphenyl Triazine |
| | 2.50 | Cosmacol ® EMI | Di-C12-13 Alkyl Malate |
| B | 0.50 | Vitamin E Acetate | Tocopheryl Acetate |
| | 4.00 | Tego Care ® 450 | Polyglyceryl-3 Methyl Glucose |
| | | | Distearate |
| C | 3.50 | Cetiol ® SN | Cetearyl Isononanoate |
| | 1.00 | Ganex ® V-220 | VP/Eicosene Copolymer |
| | 5.00 | Isohexadecane | Isohexadecane |
| | 2.50 | Cosmacol ® EMI | Di-C12-13 Alkyl Malate |
| | 5.00 | T-Lite ® SF | Titanium Dioxide, Alumina |
| | | | Hydrate, |
| | | | Dimethicone/Methicone |
| | | | Copolymer |
| D | 45.00 | Water demin. | Aqua dem. |
| | 5.00 | Glycerin 87% | Glycerin |
| | 1.00 | Lanette E | Sodium Cetearyl Sulfate |
| | 15.00 | Luviquat ® Care | Polyquaternium-44 |
| | 1.00 | Keratin-binding domain-reactive dye | |
| | | 14_264 | |
| | 0.50 | Keltrol ® | Xanthan Gum |
| E | 1.00 | Phenonip | Phenoxyethanol, |
| | | | Methylparaben, Ethylparaben, |
| | | | Butylparaben, Propylparaben, |
| | | | Isobutylparaben |
| A | 1.00 | Abil ® Care 85 | Bis-PEG/PPG-16/16 PEG/PPG-16/16 |
| | | | Dimethicone, Caprylic/Capric |
| | | | Triglyceride |
| | 3.00 | Cremophor ® CO 40 | PEG-40 Hydrogenated Castor Oil |
| | 0.30 | Cremophor ® WO 7 | PEG-7 Hydrogenated Castor Oil |
| | 5.00 | Uvinul ® MC 80 | Ethylhexyl Methoxycinnamate |
| | 10.00 | Witconol APM | PPG-3 Myristyl Ether |
| | 2.00 | Uvinul ® T 150 | Ethylhexyl Triazone |
| | 1.00 | Dow Corning ® 345 Fluid | Cyclopentasiloxane, Cyclohexasiloxane |
| | 5.00 | Uvinul ® N 539 T | Octocrylene |
| B | 5.00 | Z-COTE ® MAX | Zinc Oxide, Diphenyl Capryl Methicone |
| C | 5.00 | 1.2-Propylenglykol | Propylene Glycol |
| | 0.20 | Keltrol ® | Xanthan Gum |
| | 0.10 | Edeta BD | Disodium EDTA |
| | 2.0% | Keratin-binding domain-reactive dye | |
| | | 14_264 | |
| | 1.50 | Simulgel ® 600 | Acrylamide/Sodium |
| | | | Acryloyldimethyltaurate Copolymer, |
| | | | Isohexadecane, Polysorbate 80 |
| | 58.40 | Water demin. | Aqua dem. |
| D | q.s. | Perfume oil | |
| | 0.50 | Glydant | DMDM Hydantoin |
| A | 2.00 | Abil ® Care 85 | Bis-PEG/PPG-16/16 PEG/PPG-16/16 |
| | | | Dimethicone, Caprylic/Capric |
| | | | Triglyceride |
| | 4.00 | Finsolv ® TN | C12-15 Alkyl Benzoate |
| | 1.50 | Miglyol ® 812 | Caprylic/Capric Triglyceride |
| | 0.50 | Vitamin E Acetate | Tocopheryl Acetate |
| | 7.50 | Uvinul ® MC 80 | Ethylhexyl Methoxycinnamate |
| | 4.00 | Cetiol ® B | Dibutyl Adipate |
| | 3.00 | Luvitol ® EHO | Cetearyl Ethylhexanoate |
| | 1.00 | Cremophor ® CO 40 | PEG-40 Hydrogenated Castor Oil |
| | 1.00 | Parafin oil, low viscosity | Mineral Oil |
| | 3.00 | Plantacare ® 2000 | Decyl Glucoside |
| | 0.50 | Phenonip | Phenoxyethanol, Methylparaben, |
| | | | Ethylparaben, Butylparaben, |
| | | | Propylparaben, Isobutylparaben |
| | q.s. | Perfume oil | |
| B | 4.00 | Z-COTE ® MAX | Zinc Oxide, Diphenyl Capryl |
| | | | Methicone |
| C | 2.00 | Simulgel ® NS | Hydroxyethyl Acrylate/Sodium |
| | | | Acryloyldimethyl Taurate Copolymer, |
| | | | Squalane, Polysorbate 60 |
| | 0.20 | Keltrol ® | Xanthan Gum |
| | 0.10 | Edeta BD | Disodium EDTA |
| | 1.00 | Keratin-binding domain-reactive | |
| | | dye 14_264 | |
| | 64.20 | Water demin. | Aqua dem |
| A | 6.00 | Gilugel ® SIL 5 | Cyclomethicone, Aluminium/Magnesium |
| | | | Hydroxide Stearate |
| | 5.00 | Uvinul ® MC 80 | Ethylhexyl Methoxycinnamate |
| | 2.00 | Uvinul ® A Plus | Diethylamino Hydroxybenzoyl Hexyl |
| | | | Benzoate |
| | 1.00 | Uvinul ® T 150 | Ethylhexyl Triazone |
| | 7.00 | Finsolv ® TN | C12-15 Alkyl Benzoate |
| | 4.00 | Abil ® WE 09 | Polyglyceryl-4 Isostearate, Cetyl |
| | | | PEG/PPG-10/1 Dimethicone, Hexyl |
| | | | Laurate |
| | 2.00 | Cosmacol ® EMI | Di-C12-13 Alkyl Malate |
| | 3.00 | Isopropyl palmitate | Isopropyl Palmitate |
| | 5.00 | Abil ® B 8839 | Cyclopentasiloxane, Cyclohexasiloxane |
| | 0.50 | Abil ® 350 | Dimethicone |
| B | 0.50 | Sodium Chloride | Sodium Chloride |
| | 0.20 | Edeta BD | Disodium EDTA |
| | 0.20 | Keratin-binding domain-reactive | |
| | | dye 14_264 | |
| | 62.10 | Water demin. | Aqua dem. |
| C | 1.00 | Vitamin E Acetate | Tocopheryl Acetate |
| | 0.50 | Phenonip | Phenoxyethanol, Methylparaben, |
| | | | Ethylparaben, Butylparaben, |
| | | | Propylparaben, Isobutylparaben |
| A | 4.50 | Uvinul ® MC 80 | Ethylhexyl Methoxycinnamate |
| | 2.00 | Tinosorb ® S | Bis-Ethylhexyloxyphenol Methoxyphenyl |
| | | | Triazine |
| | 3.00 | Uvinul ® N 539 T | Octocrylene |
| | 2.50 | Cosmacol ® EMI | Di-C12-13 Alkyl Malate |
| | 0.50 | Vitamin E Acetate | Tocopheryl Acetate |
| | 4.00 | Tego Care ® 450 | Polyglyceryl-3 Methyl Glucose Distearate |
| B | 3.50 | Cetiol ® SN | Cetearyl Isononanoate |
| | 1.00 | Ganex ® V-220 | VP/Eicosene Copolymer |
| | 5.00 | Isohexadecane | Isohexadecane |
| | 2.50 | Cosmacol ® EMI | Di-C12-13 Alkyl Malate |
| | 3.00 | T-Lite ® SF | Titanium Dioxide, Alumina Hydrate, |
| | | | Dimethicone/Methicone Copolymer |
| C | 5.00 | Glycerin 87% | Glycerin |
| | 1.00 | Lanette E | Sodium Cetearyl Sulfate |
| | 0.50 | Keltrol ® | Xanthan Gum |
| | 1.00 | Keratin-binding domain- | |
| | | reactive dye 14_264 | |
| | 59.70 | Water demin. | Aqua dem. |
| D | 1.00 | Phenonip | Phenoxyethanol, Methylparaben, |
| | | | Ethylparaben, Butylparaben, |
| | | | Propylparaben, Isobutylparaben |
| | 0.30 | Bisabolol rac. | Bisabolol |
| A | 2.00 | Abil ® Care 85 | Bis-PEG/PPG-16/16 PEG/PPG-16/16 |
| | | | Dimethicone, Caprylic/Capric |
| | | | Triglyceride |
| | 4.00 | Finsolv ® TN | C12-15 Alkyl Benzoate |
| | 1.50 | Miglyol ® 812 | Caprylic/Capric Triglyceride |
| | 0.50 | Vitamin E Acetate | Tocopheryl Acetate |
| | 7.50 | Uvinul ® MC 80 | Ethylhexyl Methoxycinnamate |
| | 4.00 | Cetiol ® B | Dibutyl Adipate |
| | 1.00 | Luvitol ® EHO | Cetearyl Ethylhexanoate |
| | 1.00 | Cremophor ® CO 40 | PEG-40 Hydrogenated Castor Oil |
| | 1.00 | Paraffin oil, low viscosity | Mineral Oil |
| | 3.00 | Plantacare ® 2000 | Decyl Glucoside |
| | 1.00 | Uvinul ® A Plus | Diethylamino Hydroxybenzoyl Hexyl |
| | | | Benzoate |
| | 0.50 | Phenonip | Phenoxyethanol, Methylparaben, |
| | | | Ethylparaben, Butylparaben, |
| | | | Propylparaben, Isobutylparaben |
| | 2.50 | Uvinul ® T 150 | Ethylhexyl Triazone |
| | q.s. | Perfume oil | |
| B | 4.00 | Z-COTE ® MAX | Zinc Oxide, Diphenyl Capryl |
| | | | Methicone |
| C | 2.00 | Simulgel ® NS | Hydroxyethyl Acrylate/Sodium |
| | | | Acryloyldimethyl Taurate Copolymer, |
| | | | Squalane, Polysorbate 60 |
| | 0.10 | Keltrol ® | Xanthan Gum |
| | 0.10 | Edeta BD | Disodium EDTA |
| | 0.50 | Keratin-binding domain-reactive | |
| | | dye 14_264 | |
| | 59.90 | Water demin. | Aqua dem. |
| A | 4.00 | Eumulgin ® VL 75 | Lauryl Glucoside, Polyglyceryl-2 |
| | | | Dipolyhydroxystearate, Glycerin |
| | 2.00 | Lanette O | Cetearyl Alcohol |
| | 12.00 | Myritol ® 331 | Cocoglycerides |
| | 8.00 | Finsolv ® TN | C12-15 Alkyl Benzoate |
| | 8.00 | Cetiol ® B | Dibutyl Adipate |
| B | 6.00 | T-Lite ® SF | Titanium Dioxide, Alumina Hydrate, |
| | | | Dimethicone/Methicone Copolymer |
| | 5.00 | Z-COTE ® MAX | Zinc Oxide, Diphenyl Capryl Methicone |
| C | 3.00 | Glycerin 87% | Glycerin |
| | 0.10 | Edeta BD | Disodium EDTA |
| | 1.50 | Veegum Ultra | Magnesium Aluminum Silicate |
| | 1.50 | Lanette E | Sodium Cetearyl Sulfate |
| | 2.00 | Keratin-binding domain- | |
| | | reactive dye 14_264 | |
| | 0.30 | Keltrol ® | Xanthan Gum |
| | 45.10 | Water demin. | Aqua dem. |
| D | 1.00 | Phenonip | Phenoxyethanol, Methylparaben, |
| | | | Ethylparaben, Butylparaben, |
| | | | Propylparaben, Isobutylparaben |
| A | 4.00 | Eumulgin ® VL 75 | Lauryl Glucoside, Polyglyceryl-2 |
| | | | Dipolyhydroxystearate, Glycerin |
| | 2.00 | Lanette O | Cetearyl Alcohol |
| | 12.00 | Myritol ® 331 | Cocoglycerides |
| | 8.00 | Finsolv ® TN | C12-15 Alkyl Benzoate |
| | 8.00 | Cetiol ® B | Dibutyl Adipate |
| B | 6.00 | Uvinul ® N | Octocrylene |
| | 5.00 | Z-COTE ® MAX | Zinc Oxide, Diphenyl Capryl Methicone |
| C | 3.00 | Glycerin 87% | Glycerin |
| | 0.10 | Edeta BD | Disodium EDTA |
| | 1.50 | Veegum Ultra | Magnesium Aluminum Silicate |
| | 1.50 | Lanette E | Sodium Cetearyl Sulfate |
| | 0.30 | Carbopol ® Ultrez 10 P | Carbomer |
| | 1.00 | Keratin-binding domain- | |
| | | reactive dye 14_264 | |
| | 46.10 | Water demin. | Aqua dem. |
| D | 1.00 | Phenonip | Phenoxyethanol, Methylparaben, |
| | | | Ethylparaben, Butylparaben, |
| | | | Propylparaben, Isobutylparaben |
| A | 4.00 | Eumulgin ® VL 75 | Lauryl Glucoside, Polyglyceryl-2 |
| | | | Dipolyhydroxystearate, Glycerin |
| | 2.00 | Lanette O | Cetearyl Alcohol |
| | 10.00 | Myritol ® 331 | Cocoglycerides |
| | 8.00 | Finsolv ® TN | C12-15 Alkyl Benzoate |
| | 8.00 | Cetiol ® B | Dibutyl Adipate |
| B | 2.00 | Uvinul ® A Plus | Diethylamino Hydroxybenzoyl Hexyl |
| | | | Benzoate |
| | 5.00 | Z-COTE ® MAX | Zinc Oxide, Diphenyl Capryl Methicone |
| C | 3.00 | Glycerin 87% | Glycerin |
| | 0.10 | Edeta BD | Disodium EDTA |
| | 1.50 | Veegum Ultra | Magnesium Aluminum Silicate |
| | 1.50 | Lanette E | Sodium Cetearyl Sulfate |
| | 5.00 | Keratin-binding domain- | |
| | | reactive dye 14_264 | |
| | 0.30 | Carbopol ® Ultrez 10 P | Carbomer |
| | 48.60 | Water demin. | Aqua dem. |
| D | 1.00 | Phenonip | Phenoxyethanol, Methylparaben, |
| | | | Ethylparaben, Butylparaben, |
| | | | Propylparaben, Isobutylparaben |
| A | 3.50 | Cremophor ® A 6 | Ceteareth-6, Stearyl Alcohol |
| | 1.50 | Cremophor ® A 25 | Ceteareth-25 |
| | 7.50 | Uvinul ® MC 80 | Ethylhexyl Methoxycinnamate |
| | 2.00 | Uvinul ® A Plus | Diethylamino Hydroxybenzoyl Hexyl |
| | | | Benzoate |
| | 2.00 | Dow Corning ® 345 | Cyclopentasiloxane, Cyclohexasiloxane |
| | | | Fluid |
| | 0.50 | Beeswax 3044 RH | Beeswax |
| | 3.00 | Lanette O | Cetearyl Alcohol |
| | 10.00 | Miglyol 812 | Caprylic/Capric Triglyceride |
| B | 5.00 | T-Lite ® SF-S | Titanium Dioxide, Silica Hydrate, Alumina |
| | | | Hydrate, Methicone/Dimethicone |
| | | | Copolymer |
| C | 3.00 | Glycerin 87% | Glycerin |
| | 0.20 | Edeta BD | Disodium EDTA |
| | 0.30 | Keltrol ® T | Xanthan Gum |
| | 1.00 | Plantacare ® 2000 | Decyl Glucoside |
| | 2.00 | Keratin-binding domain- | |
| | | reactive dye 14_264 | |
| | 57.30 | Water demin. | Aqua dem. |
| D | 1.00 | Vitamin E Acetate | Tocopheryl Acetate |
| | 0.20 | Bisabolol rac. | Bisabolol |
| A | 10.00 | Uvinul ® A Plus B | Ethylhexyl Methoxycinnamate, |
| | | | Diethylamino Hydroxybenzoyl Hexyl |
| | | | Benzoate |
| | 10.00 | Uvinul ® N 539 T | Octocrylene |
| | 4.00 | Eumulgin ® VL 75 | Lauryl Glucoside, Polyglyceryl-2 |
| | | | Dipolyhydroxystearate, Glycerin |
| | 8.00 | Cetiol ® B | Dibutyl Adipate |
| | 8.00 | Finsolv ® TN | C12-15 Alkyl Benzoate |
| | 12.00 | Myritol ® 331 | Cocoglycerides |
| | 1.00 | Lanette E | Sodium Cetearyl Sulfate |
| | 2.00 | Lanette O | Cetearyl Alcohol |
| B | 3.00 | Z-COTE ® MAX | Zinc Oxide, Diphenyl Capryl Methicone |
| C | 35.08 | Water demin. | Aqua dem. |
| | 0.38 | Citric acid | Citric Acid |
| | 2.90 | Glycerin 87% | Glycerin |
| | 0.05 | Edeta BD | Disodium EDTA |
| | 0.20 | Allantoin | Allantoin |
| | 0.30 | Keltrol ® | Xanthan Gum |
| | 0.10 | Keratin-binding domain- | |
| | | reactive dye 14_264 | |
| | 1.50 | Veegum Ultra | Magnesium Aluminum Silicate |
| D | 0.50 | Phenonip | Phenoxyethanol, Methylparaben, |
| | | | Ethylparaben, Butylparaben, |
| | | | Propylparaben, Isobutylparaben |
| | 1.00 | Vitamin E Acetate | Tocopheryl Acetate |
| A | 0.70 | Cremophor ® A 25 | Ceteareth-25 |
| | 1.70 | Cremophor ® A 6 | Ceteareth-6, Stearyl Alcohol |
| | 2.00 | Uvinul ® A Plus | Diethylamino Hydroxybenzoyl Hexyl |
| | | | Benzoate |
| | 3.00 | Uvinul ® N 539 T | Octocrylene |
| | 3.00 | Z-COTE ® MAX | Zinc Oxide, Diphenyl Capryl Methicone |
| | 2.00 | Abil ® B 8843 | PEG-14 Dimethicone |
| | 3.60 | Lanette O | Cetearyl Alcohol |
| | 4.00 | Uvinul ® MC 80 | Ethylhexyl Methoxycinnamate |
| | 2.00 | Cetiol ® B | Dibutyl Adipate |
| B | 4.00 | Glycerin 87% | Glycerin |
| | 0.20 | Edeta BD | Disodium EDTA |
| | 71.00 | Water demin. | Panthenol |
| C | 4.00 | Luvigel EM | Caprylic/Capric Triglyceride, Sodium |
| | | | Acrylates Copolymer |
| D | 1.00 | Vitamin E Acetate | Tocopheryl Acetate |
| | 1.00 | Keratin-binding domain- | |
| | | reactive dye 14_264 | |
| | 0.20 | Bisabolol rac. | Bisabolol |
| | q.s. | Preservative | |
| A | 7.50 | Uvinul ® MC 80 | Ethylhexyl Methoxycinnamate |
| | 5.00 | Uvinul ® N 539 T | Octocrylene |
| | 3.00 | Emulgade ® PL 68/50 | Cetearyl Glucoside, Cetearyl Alcohol |
| | 2.00 | Dracorin ® 100 SE | Glyceryl Stearate, PEG-100 Stearate |
| | 1.00 | Fitoderm | Squalane |
| | 0.50 | Cremophor ® WO 7 | PEG-7 Hydrogenated Castor Oil |
| | 0.50 | Cremophor ® PS 20 | Polysorbate 20 |
| | 2.00 | Dry Flo Pure | Aluminum Starch Octenylsuccinate |
| B | 5.00 | Z-COTE ® MAX | Zinc Oxide, Diphenyl Capryl |
| | | | Methicone |
| | 0.03 | Sicomet ® blue P 77 007 | C.I. 77 007. Ultramarines |
| C | 4.00 | 1,2-Propylene Glycol Care | Propylene Glycol |
| | 2.00 | D-Panthenol 50 P | Panthenol, Propylene Glycol |
| | 0.20 | Keltrol ® | Xanthan Gum |
| | 0.50 | Simulgel ® 600 | Acrylamide/Sodium |
| | | | Acryloyldimethyltaurate Copolymer, |
| | | | Isohexadecane, Polysorbate 80 |
| | 0.50 | Keratin-binding domain-reactive | |
| | | dye 14_264 | |
| | 65.27 | Water demin. | Aqua dem. |
| | q.s. | Preservative | |
| | 0.50 | Vitamin E Acetate | Tocopheryl Acetate |
| A | 6.00 | Gilugel ® SIL 5 | Cyclomethicone (and) |
| | | | Aluminium/Magnesium Hydroxide |
| | | | Stearate |
| | 5.00 | Uvinul ® N 539 T | Octocrylene |
| | 2.00 | Mexoryl ® XL | Drometrizole Trisiloxane |
| | 1.00 | Uvinul ® T 150 | Ethylhexyl Triazone |
| | 3.00 | T-Lite ® SF-S | Titanium Dioxide, Silica Hydrate, Alumina |
| | | | Hydrate, Methicone/Dimethicone |
| | | | Copolymer |
| | 5.00 | Finsolv ® TN | C12-15 Alkyl Benzoate |
| | 4.00 | Abil ® WE 09 | Polyglyceryl-4 Isostearate, Cetyl |
| | | | PEG/PPG-10/1 Dimethicone, Hexyl |
| | | | Laurate |
| | 2.00 | Cosmacol ® EMI | Di-C12-13 Alkyl Malate |
| | 3.00 | Isopropyl palmitate | Isopropyl Palmitate |
| | 5.00 | Abil ® B 8839 | Cyclopentasiloxane, Cyclohexasiloxane |
| | 0.50 | Abil ® 350 | Dimethicone |
| B | 0.50 | Sodium chloride | Sodium Chloride |
| | 0.20 | Edeta BD | Disodium EDTA |
| | 1.00 | Keratin-binding domain-reactive | |
| | | dye 14_264 | |
| | 61.30 | Water demin. | Aqua dem. |
| C | 1.00 | Vitamin E Acetate | Tocopheryl Acetate |
| | 0.50 | Phenonip | Phenoxyethanol, Methylparaben, |
| | | | Ethylparaben, Butylparaben, |
| | | | Propylparaben, Isobutylparaben |
| A | 1.00 | Abil ® Care 85 | Bis-PEG/PPG-16/16 PEG/PPG-16/16 |
| | | | Dimethicone, Caprylic/Capric Triglyceride |
| | 3.00 | Cremophor ® CO 40 | PEG-40 Hydrogenated Castor Oil |
| | 0.30 | Cremophor ® WO 7 | PEG-7 Hydrogenated Castor Oil |
| | 5.00 | Uvinul ® N 539 T | Octocrylene |
| | 10.00 | Witconol APM | PPG-3 Myristyl Ether |
| | 2.00 | Uvinul ® T 150 | Ethylhexyl Triazone |
| | 1.00 | Dow Corning ® 345 Fluid | Cyclopentasiloxane, Cyclohexasiloxane |
| | 2.00 | Uvinul ® A Plus | Diethylamino Hydroxybenzoyl Hexyl |
| | | | Benzoate |
| B | 5.00 | Z-COTE ® MAX | Zinc Oxide, Diphenyl Capryl Methicone |
| C | 5.00 | 1,2-Propylene glycol | Propylene Glycol |
| | 0.20 | Keltrol ® | Xanthan Gum |
| | 0.10 | Edeta BD | Disodium EDTA |
| | 1.00 | Keratin-binding domain-reactive | |
| | | dye 14_264 | |
| | 1.50 | Simulgel ® 600 | Acrylamide/Sodium |
| | | | Acryloyldimethyltaurate Copolymer, |
| | | | Isohexadecane, Polysorbate 80 |
| | 59.40 | Water demin. | Aqua dem. |
| D | q.s. | Perfume oil | |
| | 0.50 | Glydant | DMDM Hydantoin |
| A | 7.00 | Uvinul ® A Plus B | Ethylhexyl Methoxycinnamate, |
| | | | Diethylamino Hydroxybenzoyl Hexyl |
| | | | Benzoate |
| | 1.00 | Tinosorb ® S | Bis-Ethylhexyloxyphenol Methoxyphenyl |
| | | | Triazine |
| | 1.00 | Uvinul ® T 150 | Ethylhexyl Triazone |
| | 7.00 | Uvinul ® N 539 T | Octocrylene |
| | 4.00 | Eumulgin ® VL 75 | Lauryl Glucoside, Polyglyceryl-2 |
| | | | Dipolyhydroxystearate, Glycerin |
| | 8.00 | Cetiol ® B | Dibutyl Adipate |
| | 8.00 | Finsolv ® TN | C12-15 Alkyl Benzoate |
| | 12.00 | Myritol ® 331 | Cocoglycerides |
| | 1.00 | Lanette E | Sodium Cetearyl Sulfate |
| | 2.00 | Lanette O | Cetearyl Alcohol |
| B | 5.00 | Z-COTE ® MAX | Zinc Oxide, Diphenyl Capryl Methicone |
| C | 35.35 | Water demin. | Aqua dem. |
| | 3.00 | Glycerin 87% | Glycerin |
| | 0.05 | Edeta BD | Disodium EDTA |
| | 0.20 | Allantoin | Allantoin |
| | 0.30 | Keltrol ® | Xanthan Gum |
| | 0.1% | Keratin-binding domain-reactive | |
| | | dye 14_264 | |
| | 1.50 | Veegum Ultra | Magnesium Aluminum Silicate |
| D | 0.50 | Phenonip | Phenoxyethanol, Methylparaben, |
| | | | Ethylparaben, Butylparaben, |
| | | | Propylparaben, Isobutylparaben |
| | 1.00 | Vitamin E Acetate | Tocopheryl Acetate |
| A | 7.00 | Uvinul ® A Plus B | Ethylhexyl Methoxycinnamate, |
| | | | Diethylamino Hydroxybenzoyl Hexyl |
| | | | Benzoate |
| | 1.00 | Tinosorb ® S | Bis-Ethylhexyloxyphenol Methoxyphenyl |
| | | | Triazine |
| | 1.00 | Uvinul ® T 150 | Ethylhexyl Triazone |
| | 7.00 | Uvinul ® N 539 T | Octocrylene |
| | 4.00 | Eumulgin ® VL 75 | Lauryl Glucoside, Polyglyceryl-2 |
| | | | Dipolyhydroxystearate, Glycerin |
| | 8.00 | Cetiol ® B | Dibutyl Adipate |
| | 8.00 | Finsolv ® TN | C12-15 Alkyl Benzoate |
| | 12.00 | Myritol ® 331 | Cocoglycerides |
| | 1.00 | Lanette E | Sodium Cetearyl Sulfate |
| | 2.00 | Lanette O | Cetearyl Alcohol |
| B | 5.00 | T-Lite ® SF | Titanium Dioxide, Alumina Hydrate, |
| | | | Dimethicone/Methicone Copolymer |
| C | 30.45 | Water demin. | Aqua dem. |
| | 3.00 | Glycerin 87% | Glycerin |
| | 0.05 | Edeta BD | Disodium EDTA |
| | 0.20 | Allantoin | Allantoin |
| | 0.30 | Keltrol ® | Xanthan Gum |
| | 5.00 | Keratin-binding domain- | |
| | | reactive dye 14_264 | |
| | 1.50 | Veegum Ultra | Magnesium Aluminum Silicate |
| D | 0.50 | Phenonip | Phenoxyethanol, Methylparaben, |
| | | | Ethylparaben, Butylparaben, |
| | | | Propylparaben, Isobutylparaben |
| | 1.00 | Vitamin E Acetate | Tocopheryl Acetate |
| | 5.00 | Z-COTE ® MAX | Zinc Oxide, Diphenyl Capryl |
| | | | Methicone |
| | 2.00 | Uvinul ® A Plus | Diethylamino Hydroxybenzoyl |
| | | | Hexyl Benzoate |
| | 2.00 | Mexoryl ® XL | Drometrizole Trisiloxane |
| | 3.00 | Uvinul ® MC 80 | Ethylhexyl Methoxycinnamate |
| | 0.50 | Abil ® 350 | Dimethicone |
| | 2.75 | Carnico wax LT 20 | Copernica Cerifera (Carnauba) |
| | | | Wax, Paraffin |
| | 3.70 | Candelilla wax LT 281 LJ | Euphorbia Cerifera (Candelilla) |
| | | | Wax |
| | 1.80 | Beeswax 3050 PH | Beeswax |
| | 3.20 | TeCero wax 30445 | Microcrystalline Wax |
| | 3.20 | TeCero wax 1030 K | Microcrystalline Wax |
| | 1.34 | Cutina CP | Cetyl Palmitate |
| | 6.40 | Vaseline | Petrolatum |
| | 7.30 | Softisan 100 | Hydrogenated Coco-Glycerides |
| | 10.00 | Luvitol ® EHO | Cetearyl Ethylhexanoate |
| | 0.17 | Bisabolol nat. | Bisabolol |
| | 1.84 | Vitamin E Acetate | Tocopheryl Acetate |
| | 1.00 | Keratin-binding domain-reactive dye | |
| | | 14_264 | |
| | 0.42 | D,L-Alpha-Tocopherol | Tocopherol |
| | 40.38 | Castor Oil | Ricinus Communis (Castor) Oil |
| A | 1.00 | Abil ® Care 85 | Bis-PEG/PPG-16/16 PEG/PPG-16/16 |
| | | | Dimethicone, Caprylic/Capric Triglyceride |
| | 3.00 | Cremophor ® CO 40 | PEG-40 Hydrogenated Castor Oil |
| | 0.30 | Cremophor ® WO 7 | PEG-7 Hydrogenated Castor Oil |
| | 2.00 | Mexoryl ® XL | Drometrizole Trisilioxane |
| | 10.00 | Witconol ® APM | PPG-3 Myristyl Ether |
| | 1.00 | Uvinul ® T 150 | Ethylhexyl Triazone |
| | 1.00 | Dow Corning ® 345 Fluid | Cyclopentasiloxane, Cyclohexasiloxane |
| | 5.00 | Uvinul ® N 539 T | Octocrylene |
| B | 3.00 | T-Lite ® SF-S | Titanium Dioxide, Silica Hydrate, Alumina |
| | | | Hydrate, Methicone/Dimethicone |
| | | | Copolymer |
| C | 5.00 | 1,2-Propylene glycol | Propylene Glycol |
| | 1.00 | Mexoryl ® SX | Terephthalidene Dicamphor Sulfonic Acid |
| | 0.20 | Keltrol ® | Xanthan Gum |
| | 0.10 | Edeta BD | Disodium EDTA |
| | 1.00 | Keratin-binding domain-reactive | |
| | | dye 14_264 | |
| | 1.50 | Simulgel ® 600 | Acrylamide/Sodium |
| | | | Acryloyldimethyltaurate Copolymer, |
| | | | Isohexadecane, Polysorbate 80 |
| | 69.50 | Water demin. | Aqua dem. |
| D | q.s. | Perfume oil | |
| | 0.50 | Glydant | DMDM Hydantoin |
| A | 1.00 | Abil ® Care 85 | Bis-PEG/PPG-16/16 PEG/PPG-16/16 |
| | | | Dimethicone, Caprylic/Capric Triglyceride |
| | 3.00 | Cremophor ® CO 40 | PEG-40 Hydrogenated Castor Oil |
| | 0.30 | Cremophor ® WO 7 | PEG-7 Hydrogenated Castor Oil |
| | 2.00 | Parsol ® 1789 | Butyl Methoxydibenzoylmethane |
| | 2.00 | Mexoryl ® XL | Drometrizole Trisilioxane |
| | 10.00 | Witconol ® APM | PPG-3 Myristyl Ether |
| | 1.00 | Uvinul ® T 150 | Ethylhexyl Triazone |
| | 1.00 | Dow Corning ® 345 Fluid | Cyclopentasiloxane, Cyclohexasiloxane |
| | 5.00 | Uvinul ® N 539 T | Octocrylene |
| B | 3.00 | T-Lite ® SF-S | Titanium Dioxide, Silica Hydrate, Alumina |
| | | | Hydrate, Methicone/Dimethicone |
| | | | Copolymer |
| C | 5.00 | 1,2-Propylene glycol | Propylene Glycol |
| | 1.00 | Mexoryl ® SX | Terephthalidene Dicamphor Sulfonic Acid |
| | 0.20 | Keltrol ® | Xanthan Gum |
| | 0.10 | Edeta BD | Disodium EDTA |
| | 0.20 | Keratin-binding domain-reactive | |
| | | dye 14_264 | |
| | 1.50 | Simulgel ® 600 | Acrylamide/Sodium |
| | | | Acryloyldimethyltaurate Copolymer, |
| | | | Isohexadecane, Polysorbate 80 |
| | 68.30 | Water demin. | Aqua dem. |
| D | q.s. | Perfume oil | |
| | 0.50 | Glydant | DMDM Hydantoin |
| A | 0.70 | Cremophor ® A 25 | Ceteareth-25 |
| | 1.70 | Cremophor ® A 6 | Ceteareth-6, Stearyl Alcohol |
| | 2.00 | Parsol ® 1789 | Butyl Methoxydibenzoylmethane |
| | 5.00 | Uvinul ® N 539 T | Octocrylene |
| | 4.00 | Z-COTE ® MAX | Zinc Oxide, Diphenyl Capryl Methicone |
| | 2.00 | Abil ® B 8843 | PEG-14 Dimethicone |
| | 3.60 | Lanette O | Cetearyl Alcohol |
| | 1.00 | Uvinul ® T150 | Ethylhexyl Triazone |
| | 2.00 | Cetiol ® B | Dibutyl Adipate |
| B | 4.00 | Glycerin 87% | Glycerin |
| | 0.20 | Edeta BD | Disodium EDTA |
| | 71.00 | Water demin. | Panthenol |
| C | 4.00 | Luvigel ® EM | Caprylic/Capric Triglyceride, Sodium |
| | | | Acrylates Copolymer |
| | 1.00 | Keratin-binding domain- | |
| | | reactive dye 14_264 | |
| D | 1.00 | Vitamin E Acetate | Tocopheryl Acetate |
| | 0.20 | Bisabolol rac. | Bisabolol |
| | q.s. | Preservative | |
| A | 1.00 | Abil ® Care 85 | Bis-PEG/PPG-16/16 PEG/PPG-16/16 |
| | | | Dimethicone, Caprylic/Capric Triglyceride |
| | 3.00 | Cremophor ® CO 40 | PEG-40 Hydrogenated Castor Oil |
| | 0.30 | Cremophor ® WO 7 | PEG-7 Hydrogenated Castor Oil |
| | 2.00 | Parsol ® 1789 | Butyl Methoxydibenzoylmethane |
| | 2.00 | Mexoryl ® XL | Drometrizole Trisilioxane |
| | 10.00 | Witconol APM | PPG-3 Myristyl Ether |
| | 1.00 | Uvinul ® T 150 | Ethylhexyl Triazone |
| | 1.00 | Dow Corning ® 345 Fluid | Cyclopentasiloxane, Cyclohexasiloxane |
| | 5.00 | Uvinul ® N 539 T | Octocrylene |
| B | 3.00 | Z-COTE ® MAX | Zinc Oxide, Diphenyl Capryl Methicone |
| C | 5.00 | 1,2-Propylene glycol | Propylene Glycol |
| | 1.00 | Mexoryl ® SX | Terephthalidene Dicamphor Sulfonic Acid |
| | 0.20 | Keltrol ® | Xanthan Gum |
| | 0.10 | Edeta BD | Disodium EDTA |
| | 1.50 | Simulgel ® 600 | Acrylamide/Sodium |
| | | | Acryloyldimethyltaurate Copolymer, |
| | | | Isohexadecane, Polysorbate 80 |
| | 0.50 | Keratin-binding domain-reactive | |
| | | dye 14_264 | |
| | 68.00 | Water demin. | Aqua dem. |
| D | q.s. | Perfume oil | |
| | 0.50 | Glydant | DMDM Hydantoin |
| A | 2.00 | Uvinul ® A Plus | Diethylamino Hydroxybenzoyl Hexyl |
| | | | Benzoate |
| | 3.00 | Uvinul ® N 539 T | Octocrylene |
| | 3.00 | Emulgade ® PL 68/50 | Cetearyl Glucoside, Cetearyl Alcohol |
| | 2.00 | Dracorin ® 100 SE | Glyceryl Stearate, PEG-100 Stearate |
| | 1.00 | Fitoderm | Squalane |
| | 0.5 | Cremophor ® WO 7 | PEG-7 Hydrogenated Castor Oil |
| | 0.5 | Cremophor ® PS 20 | Polysorbate 20 |
| | 2.00 | Dry Flo Pure | Aluminum Starch Octenylsuccinate |
| B | 5.00 | Z-COTE ® MAX | Zinc Oxide, Diphenyl Capryl Methicone |
| C | 4.00 | 1,2-Propylene Glycol Care | Propylene Glycol |
| | 0.20 | Keltrol ® | Xanthan Gum |
| | 0.50 | Simulgel ® 600 | Acrylamide/Sodium |
| | | | Acryloyldimethyltaurate Copolymer, |
| | | | Isohexadecane, Polysorbate 80 |
| | 66.30 | Water demin. | Aqua dem. |
| D | q.s. | Preservative | |
| | 0.50 | Vitamin E-Acetat | Tocopheryl Acetate |
| | 1.00 | Keratin-binding domain- | |
| | | reactive dye 14_264 | |
| | 1.00 | RetiSTAR ™ | Caprylic/Capric Triglyceride, Sodium |
| | | | Ascorbate, Tocopherol, Retinol |

1. A keratin-binding effector molecule comprising
(a) at least one reactive dye (i) and
(b) at least one keratin-binding polypeptide (ii).

2. The keratin-binding effector molecule according to claim 1, where the keratin-binding polypeptide (ii) has binding affinity to human hair keratin, nail keratin or skin keratin.

3. The keratin-binding effector molecule according to claim 1, where the keratin-binding polypeptide (ii) used
(a) comprises at least one of the sequences according to SEQ ID No.: 2, 4, 6, 8, 10, 12, 14, 16, 18, 20, 22, 24, 26, 28, 30, 32, 34, 36, 38, 40, 42, 44, 46, 48, 50, 52, 54, 56, 58, 60, 62, 64, 66, 68, 70, 72, 74, 76, 78, 80, 82, 84, 86, 88, 90, 92, 94, 96, 98, 100, 102, 104, 106, 108, 110, 112, 114, 116, 118, 120, 122, 124, 126, 128, 130, 132, 134, 136, 138, 140, 146, 150, 153, 156, 157, 158, 160, 162, 164, 166, 168 or 170, or
(b) corresponds to a polypeptide which is at least 40% identical to at least one of the sequences according to SEQ ID No.: 2, 4, 6, 8, 10, 12, 14, 16, 18, 20, 22, 24, 26, 28, 30, 32, 34, 36, 38, 40, 42, 44, 46, 48, 50, 52, 54, 56, 58, 60, 62, 64, 66, 68, 70, 72, 74, 76, 78, 80, 82, 84, 86, 88, 90, 92, 94, 96, 98, 100, 102, 104, 106, 108, 110, 112, 114, 116, 118, 120, 122, 124, 126, 128, 130, 132, 134, 136, 138, 140, 146, 150, 153, 156, 157, 158, 160, 162, 164, 166, 168 or 170 and is able to bind keratin.

4. The keratin-binding effector molecule according to claim 1, where the keratin-binding polypeptide (ii) used is encoded by nucleic acid molecule comprising at least one nucleic acid molecule chosen from the group consisting of:
a) a nucleic acid molecule which encodes a polypeptide comprising the sequence shown in SEQ ID NO: 2, 4, 6, 8, 10, 12, 14, 16, 18, 20, 22, 24, 26, 28, 30, 32, 34, 36, 38, 40, 42, 44, 46, 48, 50, 52, 54, 56, 58, 60, 62, 64, 66, 68, 70, 72, 74, 76, 78, 80, 82, 84, 86, 88, 90, 92, 94, 96, 98, 100, 102, 104, 106, 108, 110, 112, 114, 116, 118, 120, 122, 124, 126, 128, 130, 132, 134, 136, 138, 140, 146, 150, 153, 156, 157, 158, 160, 162, 164, 166, 168 or 170;
b) a nucleic acid molecule which comprises at least one polynucleotide of the sequence shown in SEQ ID NO: 1, 3, 5, 7, 9, 11, 13, 15, 17, 19, 21, 23, 25, 27, 29, 31, 33, 35, 37, 39, 41, 43, 45, 47, 49, 51, 53, 55, 57, 59, 61, 63, 65, 67, 69, 71, 73, 75, 77, 79, 81, 83, 85, 87, 89, 91, 93, 95, 97, 99, 101, 103, 105, 107, 109, 111, 113, 115, 117, 119, 121, 123, 125, 127, 129, 131, 133, 135, 137, 139, 145, 149, 152, 159, 161, 163, 165, 167 or 169;
c) a nucleic acid molecule which encodes a polypeptide according to the sequence SEQ ID NO: 2, 4, 6, 8, 10, 12, 14, 16, 18, 20, 22, 24, 26, 28, 30, 32, 34, 36, 38, 40, 42, 44, 46, 48, 50, 52, 54, 56, 58, 60, 62, 64, 66, 68, 70, 72, 74, 76, 78, 80, 82, 84, 86, 88, 90, 92, 94, 96, 98, 100, 102, 104, 106, 108, 110, 112, 114, 116, 118, 120, 122, 124, 126, 128, 130, 132, 134, 136, 138, 140, 146, 150, 153, 156, 157, 158, 160, 162, 164, 166, 168 or 170;
d) a nucleic acid molecule with a nucleic acid sequence corresponding to at least one of the sequences according to SEQ ID NO: 1, 3, 5, 7, 9, 11, 13, 15, 17, 19, 21, 23, 25, 27, 29, 31, 33, 35, 37, 39, 41, 43, 45, 47, 49, 51, 53, 55, 57, 59, 61, 63, 65, 67, 69, 71, 73, 75, 77, 79, 81, 83, 85, 87, 89, 91, 93, 95, 97, 99, 101, 103, 105, 107, 109, 111, 113, 115, 117, 119, 121, 123, 125, 127, 129, 131, 133, 135, 137, 139, 145, 149, 152, 159, 161, 163, 165, 167 or 169 or a nucleic acid molecule derived therefrom by substitution, deletion or insertion which encodes a polypeptide which is at least 40% identical to at least one of the sequences according to SEQ ID NO: 2, 4, 6, 8, 10, 12, 14, 16, 18, 20, 22, 24, 26, 28, 30, 32, 34, 36, 38, 40, 42, 44, 46, 48, 50, 52, 54, 56, 58, 60, 62, 64, 66, 68, 70, 72, 74, 76, 78, 80, 82, 84, 86, 88, 90, 92, 94, 96, 98, 100, 102, 104, 106, 108, 110, 112, 114, 116, 118, 120, 122, 124, 126, 128, 130, 132, 134, 136, 138, 140, 146, 150, 153, 156, 157, 158, 160, 162, 164, 166, 168 or 170 and is able to bind to keratin;
e) a nucleic acid molecule which encodes a polypeptide which is recognized by a monoclonal antibody directed toward a polypeptide which is encoded by the nucleic acid molecule as in (a) to (c);
f) a nucleic acid molecule coding for a keratin-binding protein which hybridizes under stringent conditions with a nucleic acid molecule as in (a) to (c);
g) a nucleic acid molecule coding for a keratin-binding protein which can be isolated from a DNA bank using a nucleic acid molecule as in (a) to (c) or part fragments thereof comprising at least 15 nucleotides as probe under stringent hybridization conditions; and
h) a nucleic acid molecule which can be produced by back-translation of one of the amino acid sequences shown in the sequences SEQ ID NO: 2, 4, 6, 8, 10, 12, 14, 16, 18, 20, 22, 24, 26, 28, 30, 32, 34, 36, 38, 40, 42, 44, 46, 48, 50, 52, 54, 56, 58, 60, 62, 64, 66, 68, 70, 72, 74, 76, 78, 80, 82, 84, 86, 88, 90, 92, 94, 96, 98, 100, 102, 104, 106, 108, 110, 112, 114, 116, 118, 120, 122, 124, 126, 128, 130, 132, 134, 136, 138, 140, 146, 150, 153, 156, 157, 158, 160, 162, 164, 166, 168 or 170.

5. The keratin-binding effector molecule according to claim 1, where the reactive dye (i) has at least one reactive anchor chosen from the group consisting of
(a) a group of the formula 1 activatable under alkaline conditions,
formula 1 [chemical structure]
in which [symbol]
means the bond to the dye molecule (D),
X is an electron-withdrawing radical or is an alkyl, —O-alkyl, cyano, hydroxy, halogen radical or H,
k is 1, 2 or 3,
n is 0 or 1, and
B is a group CH═CH₂ or a group CH₂—CH₂-Q or —NH—CH₂—CH₂-Q or —NH—CH═CH₂, in which Q is a group which can be cleaved off under alkaline conditions,
(b) an acrylamido anchor of formula 2, [chemical structure]
in which [symbol]
means the bond to the dye molecule D, and
(c) one of the compounds according to formulae 3, 4 or 5, [chemical structure]
in which [symbol]
means the bond to the dye molecule (D),
V is fluorine or chlorine;
U₁, U₂, independently of one another, are fluoro, chloro or hydrogen; and
Q₁, Q₂, independently of one another, are chloro, fluoro, cyanamide, hydroxy, (C₁-C₆)-alkoxy, phenoxy, sulfophenoxy, mercapto, (C₁-C₆)-alkylmercapto, pyridino, carboxypyridino, carbamoylpyridino, or a group of the general formula (6) or (7), [chemical structure]
in which R² is hydrogen or (C₁-C₆)-alkyl, sulfo-(C₁-C₆)-alkyl, or phenyl, which is unsubstituted or substituted by (C₁-C₄)-alkyl, (C₁-C₄)-alkoxy, sulfo, halogen, carboxy, acetamido, ureido;
R³ and R⁴, independently of one another, have one of the meanings of R², or are a group of the general formula (8), [chemical structure]
or form a cyclic ring system of the formula —(CH₂)ⱼ—, where j is 4 or 5, or alternatively —(CH₂)₂-E-(CH₂)₂—, where E is oxygen, sulfur, sulfo, —NR⁵— where R^{5′}═(C₁-C₆)-alkyl;
W is phenylene which is unsubstituted or substituted by 1 or 2 substituents, such as (C₁-C₄)-alkyl, (C₁-C₄)-alkoxy, carboxy, sulfo, chloro, bromo, or is (C₁-C₄)-alkylene-arylene or (C₂-C₆)-alkylene, which may be interrupted by oxygen, sulfur, sulfo, amino, carbonyl, carbonamido, or is phenylene-CONH-phenylene which is unsubstituted or substituted by (C₁-C₄)-alkyl, (C₁-C₄)-alkoxy, hydroxy, sulfo, carboxy, amido, ureido or halogen, or is naphthylene which is unsubstituted or substituted by one or two sulfo groups;
Z is a group CH═CH₂ or a group CH₂—CH₂-Q or —NH—CH₂—CH₂-Q or —NH—CH═CH₂, in which Q is a group which can be cleaved off under alkaline conditions;
R²⁴, R²⁵ and R²⁶ are (C₁-C₄)-alkyl or (C₁-C₄)-hydroxyalkyl, and
B— is the equivalent of an anion, such as hydrogensulfate, sulfate, fluoride, chloride, bromide, dihydrogenphosphate, hydrogenphosphate, phosphate, hydroxide or acetate.

6. The keratin-binding effector molecule according to claim 5, where at least one of the radicals X in formula 1 is a group SO₃H.

7. The keratin-binding effector molecule according to claim 5, in which B in formula 1 is —CH═CH₂, a group —CH₂—CH₂—O—SO₃H or is —CH₂—CH₂Cl.

8. The keratin-binding effector molecule according to claim 5, in which the activatable group of formula 1 is bonded to the dye molecule (D) via a group —NH—, —N═N—, —NH—C(O)—, —NH—SO₂— or —N(R)—, where R is alkyl.

9. The keratin-binding effector molecule according to claim 8, where the dye (D) is chosen from dyes of the phthalocyanine series, anthraquinone dyes, azo dyes, formazane dyes, dioxazine dyes, actidine dyes, xanthene dyes, polymethine dyes, stilbene dyes, sulfur dyes, triarylmethane dyes, benzopyran dyes, dibenzanthrone dyes and the metal complexes of these dyes.

10. The keratin-binding effector molecule according to claim 5, in which “n” in formula 1 is zero.

11. The keratin-binding effector molecule according to claim 5, comprising at least one reactive dye, in which the reactive anchor according to formulae 1 to 5 is chosen from the following radicals (1-1) to (1-43):

[chemical structure]

[chemical structure]

[chemical structure]

[chemical structure]

[chemical structure]

12. The keratin-binding effector molecule according to claim 1, where the reactive dye (i) is coupled to the keratin-binding polypeptide (ii) indirectly via a linker molecule.

13. The keratin-binding effector molecule according to claim 12, where a linker molecule (iii) according to formula 9 or 10 is used, [chemical structure]
where “n” is an integer between 0 and 40.

14. A hair colorant comprising the keratin-binding effector molecule of claim 1.

15. A hair colorant comprising the keratin-binding effector molecule claim 4.

16. A method of coloring hair or skin comprising using at least one keratin-binding effector molecule comprising
(a) at least one keratin-binding polypeptide (ii) and
(b) a reactive dye (i) or dye.

17. The method according to claim 16, where the at least one keratin-binding polypeptide (ii) is encoded by a nucleic acid molecule comprising at least one nucleic acid molecule chosen from the group consisting of:
a) a nucleic acid molecule which encodes a polypeptide comprising the sequence shown in SEQ ID NO: 2, 4, 6, 8, 10, 12, 14, 16, 18, 20, 22, 24, 26, 28, 30, 32, 34, 36, 38, 40, 42, 44, 46, 48, 50, 52, 54, 56, 58, 60, 62, 64, 66, 68, 70, 72, 74, 76, 78, 80, 82, 84, 86, 88, 90, 92, 94, 96, 98, 100, 102, 104, 106, 108, 110, 112, 114, 116, 118, 120, 122, 124, 126, 128, 130, 132, 134, 136, 138, 140, 146, 150, 153, 156, 157, 158, 160, 162, 164, 166, 168 or 170,
b) a nucleic acid molecule which comprises at least one polynucleotide of the sequence shown in SEQ ID NO: 1, 3 5, 7, 9, 11, 13, 15, 17, 19, 21, 23, 25, 27, 29, 31, 33, 35, 37, 39, 41, 43, 45, 47, 49, 51, 53, 55, 57, 59, 61, 63, 65, 67, 69, 71, 73, 75, 77, 79, 81, 83, 85, 87, 89, 91, 93, 95, 97, 99, 101, 103, 105, 107, 109, 111, 113, 115, 117, 119, 121, 123, 125, 127, 129, 131, 133, 135, 137, 139, 145, 149, 152, 159, 161, 163, 165, 167 or 169;
c) a nucleic acid molecule which encodes a polypeptide according to the sequence SEQ ID NO: 2, 4, 6, 8, 10, 12, 14, 16, 18, 20, 22, 24, 26, 28, 30, 32, 34, 36, 38, 40, 42, 44, 46, 48, 50, 52, 54, 56, 58, 60, 62, 64, 66, 68, 70, 72, 74, 76, 78, 80, 82, 84, 86, 88, 90, 92, 94, 96, 98, 100, 102, 104, 106, 108, 110, 112, 114, 116, 118, 120, 122, 124, 126, 128, 130, 132, 134, 136, 138, 140, 146, 150, 153, 156, 157, 158, 160, 162, 164, 166, 168 or 170;
d) a nucleic acid molecule with a nucleic acid sequence corresponding to at least one of the sequences according to SEQ ID NO: 1, 3, 5, 7, 9, 11, 13, 15, 17, 19, 21, 23, 25, 27, 29, 31, 33, 35, 37, 39, 41, 43, 45, 47, 49, 51, 53, 55, 57, 59, 61, 63, 65, 67, 69, 71, 73, 75, 77, 79, 81, 83, 85, 87, 89, 91, 93, 95, 97, 99, 101, 103, 105, 107, 109, 111, 113, 115, 117, 119, 121, 123, 125, 127, 129, 131, 133, 135, 137, 139, 145, 149, 152, 159, 161, 163, 165, 167 or 169 or a nucleic acid molecule derived therefrom by substitution, deletion or insertion which encodes a polypeptide which is at least 40% identical to at least one of the sequences according to SEQ ID NO: 2, 4, 6, 8, 10, 12, 14, 16, 18, 20, 22, 24, 26, 28, 30, 32, 34, 36, 38, 40, 42, 44, 46, 48, 50, 52, 54, 56, 58, 60, 62, 64, 66, 68, 70, 72, 74, 76, 78, 80, 82, 84, 86, 88, 90, 92, 94, 96, 98, 100, 102, 104, 106, 108, 110, 112, 114, 116, 118, 120, 122, 124, 126, 128, 130, 132, 134, 136, 138, 140, 146, 150, 153, 156, 157, 158, 160, 162, 164, 166, 168 or 170 and is able to bind to keratin;
e) a nucleic acid molecule which encodes a polypeptide which is recognized by a monoclonal antibody directed toward a polypeptide which is encoded by the nucleic acid molecule as in (a) to (c);
f) a nucleic acid molecule coding for a keratin-binding protein which hybridizes under stringent conditions with a nucleic acid molecule as in (a) to (c);
g) a nucleic acid molecule coding for a keratin-binding protein which can be isolated from a DNA bank using a nucleic acid molecule as in (a) to (c) or part fragments thereof comprising at least 15 nucleotides as probe under stringent hybridization conditions; and
h) a nucleic acid molecule which can be produced by back-translation of one of the amino acid sequences shown in the sequences SEQ ID NO: 2, 4, 6, 8, 10, 12, 14, 16, 18, 20, 22, 24, 26, 28, 30, 32, 34, 36, 38, 40, 42, 44, 46, 48, 50, 52, 54, 56, 58, 60, 62, 64, 66, 68, 70, 72, 74, 76, 78, 80, 82, 84, 86, 88, 90, 92, 94, 96, 98, 100, 102, 104, 106, 108, 110, 112, 114, 116, 118, 120, 122, 124, 126, 128, 130, 132, 134, 136, 138, 140, 146, 150, 153, 156, 157, 158, 160, 162, 164, 166, 168 or 170.

18. The method according to claim 16, where the dyeing is reversible, in which the keratin-binding effector molecule is removed from skin or hair in a displacement reaction by treatment with a solution comprising
i. keratin-binding polypeptides, or
ii. skin or hair keratin, or
iii. detergent.

19. A method of coloring hair or skin comprising utilizing at least one keratin-binding effector molecule of claim 5.

The application's sequence listing, which the Patent Office published only in electronic form, follows.

SEQUENCE LISTING (176 sequences)

SEQ ID NO: 1 - DNA, 8616 bp, Homo sapiens
  CDS (1)..(8616)
atgagctgcaacggaggctcccacccgcggatcaacactctgggccgcatgatccgcgccgagtctggcccggacctgcgctacgaggtgaccagcggcggcgggggcaccagcaggatgtactattctcggcgcggcgtgatcaccgaccagaactcggacggctactgtcaaaccggcacgatgtccaggcaccagaaccagaacaccatccaggagctgctgcagaactgctccgactgcttgatgcgagcagagctcatcgtgcagcctgaattgaagtatggagatggaatacaactgactcggagtcgagaattggatgagtgttttgcccaggccaatgaccaaatggaaatcctcgacagcttgatcagagagatgcggcagatgggccagccctgtgatgcttaccagaaaaggcttcttcagctccaagagcaaatgcgagccctttataaagccatcagtgtccctcgagtccgcagggccagctccaagggtggtggaggctacacttgtcagagtggctctggctgggatgagttcaccaaacatgtcaccagtgaatgtttggggtggatgaggcagcaaagggcggagatggacatggtggcctggggtgtggacctggcctcagtggagcagcacattaacagccaccggggcatccacaactccatcggcgactatcgctggcagctggacaaaatcaaagccgacctgcgcgagaaatctgcgatctaccagttggaggaggagtatgaaaacctgctgaaagcgtcctttgagaggatggatcacctgcgacagctgcagaacatcattcaggccacgtccagggagatcatgtggatcaatgactgcgaggaggaggagctgctgtacgactggagcgacaagaacaccaacatcgctcagaaacaggaggccttctccatacgcatgagtcaactggaagttaaagaaaaagagctcaataagctgaaacaagaaagtgaccaacttgtcctcaatcagcatccagcttcagacaaaattgaggcctatatggacactctgcagacgcagtggagttggattcttcagatcaccaagtgcattgatgttcatctgaaagaaaatgctgcctactttcagttttttgaagaggcgcagtctactgaagcatacctgaaggggctccaggactccatcaggaagaagtacccctgcgacaagaacatgcccctgcagcacctgctggaacagatcaaggagctggagaaagaacgagagaaaatccttgaatacaagcgtcaggtgcagaacttggtaaacaagtctaagaagattgtacagctgaagcctcgtaacccagactacagaagcaataaacccattattctcagagctctctgtgactacaaacaagatcagaaaatcgtgcataagggggatgagtgtatcctgaaggacaacaacgagcgcagcaagtggtacgtgacgggcccgggaggcgttgacatgcttgttccctctgtggggctgatcatccctcctccgaacccactggccgtggacctctcttgcaagattgagcagtactacgaagccatcttggctctgtggaaccagctctacatcaacatgaagagcctggtgtcctggcactactgcatgattgacatagagaagatcagggccatgacaatcgccaagctgaaaacaatgcggcaggaagattacatgaagacgatagccgaccttgagttacattaccaagagttcatcagaaatagccaaggctcagagatgtttggagatgatgacaagcggaaaatacagtctcagttcaccgatgcccagaagcattaccagaccctggtcattcagctccctggctatccccagcaccagacagtgaccacaactgaaatcactcatcatggaacctgccaagatgtcaaccataataaagtaattgaaaccaacagagaaaatgacaagcaagaaacatggatgctgatggagctgcagaagattcgcaggcagatagagcactgcgagggcaggatgactctcaaaaacctccctctagcagaccaggggtcttctcaccacatcacagtgaaaattaacgagcttaagagtgtgcagaatgattcacaagcaattgctgaggttctcaaccagcttaaagatatgcttgccaacttcagaggttctgaaaagtactgctatttacagaatgaagtatttggactatttcagaaactggaaaatatcaatggtgttacagatggctacttaaatagcttatgcacagtaagggcactgctccaggctattctccaaacagaagacatgttaaaggtttatgaagccaggctcactgaggaggaaactgtctgcctggacctggataaagtggaagcttaccgctgtggactgaagaaaataaaaaatgacttgaacttgaagaagtcgttgttggccactatgaagacagaactacagaaagcccagcagatccactctcagacttcacagcagtatccactttatgatctggacttgggcaagttcggtgaaaaagtcacacagctgacagaccgctggcaaaggatagataaacagatcgactttaggttatgggacctggagaaacaaatcaagcaattgaggaattatcgtgataactatcaggctttctgcaagtggctctatgatgctaaacgccgccaggattccttagaatccatgaaatttggagattccaacacagtcatgcggtttttgaatgagcagaagaacttgcacagtgaaatatctggcaaacgagacaaatcagaggaagtacaaaaaattgctgaactttgcgccaattcaattaaggattatgagctccagctggcctcatacacctcaggactggaaactctgctgaacatacctatcaagaggaccatgattcagtccccttctggggtgattctgcaagaggctgcagatgttcatgctcggtacattgaactacttacaagatctggagactattacaggttcttaagtgagatgctgaagagtttggaagatctgaagctgaaaaataccaagatcgaagttttggaagaggagctcagactggcccgagatgccaactcggaaaactgtaataagaacaaattcctggatcagaacctgcagaaataccaggcagagtgttcccagttcaaagcgaagcttgcgagcctggaggagctgaagagacaggctgagctggatgggaagtcggctaagcaaaatctagacaagtgctacggccaaataaaagaactcaatgagaagatcacccgactgacttatgagattgaagatgaaaagagaagaagaaaatctgtggaagacagatttgaccaacagaagaatgactatgaccaactgcagaaagcaaggcaatgtgaaaaggagaaccttggttggcagaaattagagtctgagaaagccatcaaggagaaggagtacgagattgaaaggttgagggttctactgcaggaagaaggcacccggaagagagaatatgaaaatgagctggcaaaggtaagaaaccactataatgaggagatgagtaatttaaggaacaagtatgaaacagagattaacattacgaagaccaccatcaaggagatatccatgcaaaaagaggatgattccaaaaatcttagaaaccagcttgatagactttcaagggaaaatcgagatctgaaggatgaaattgtcaggctcaatgacagcatcttgcaggccactgagcagcgaaggcgagctgaagaaaacgcccttcagcaaaaggcctgtggctctgagataatgcagaagaagcagcatctggagatagaactgaagcaggtcatgcagcagcgctctgaggacaatgcccggcacaagcagtccctggaggaggctgccaagaccattcaggacaaaaataaggagatcgagagactcaaagctgagtttcaggaggaggccaagcgccgctgggaatatgaaaatgaactgagtaaggtaagaaacaattatgatgaggagatcattagcttaaaaaatcagtttgagaccgagatcaacatcaccaagaccaccatccaccagctcaccatgcagaaggaagaggataccagtggctaccgggctcagatagacaatctcacccgagaaaacaggagcttatctgaagaaataaagaggctgaagaacactctaacccagaccacagagaatctcaggagggtggaagaagacatccaacagcaaaaggccactggctctgaggtgtctcagaggaaacagcagctggaggttgagctgagacaagtcactcagatgcgaacagaggagagcgtaagatataagcaatctcttgatgatgctgccaaaaccatccaggataaaaacaaggagatagaaaggttaaaacaactgatcgacaaagaaacaaatgaccggaaatgcctggaagatgaaaacgcgagattacaaagggtccagtatgacctgcagaaagcaaacagtagtgcgacggagacaataaacaaactgaaggttcaggagcaagaactgacacgcctgaggatcgactatgaaagggtttcccaggagaggactgtgaaggaccaggatatcacgcggttccagaactctctgaaagagctgcagctgcagaagcagaaggtggaagaggagctgaatcggctgaagaggaccgcgtcagaagactcctgcaagaggaagaagctggaggaagagctggaaggcatgaggaggtcgctgaaggagcaagccatcaaaatcaccaacctgacccagcagctggagcaggcatccattgttaagaagaggagtgaggatgacctccggcagcagagggacgtgctggatggccacctgagggaaaagcagaggacccaggaagagctgaggaggctctcttctgaggtcgaggccctgaggcggcagttactccaggaacaggaaagtgtcaaacaagctcacttgaggaatgagcatttccagaaggcgatagaagataaaagcagaagcttaaatgaaagcaaaatagaaattgagaggctgcagtctctcacagagaacctgaccaaggagcacttgatgttagaagaagaactgcggaacctgaggctggagtacgatgacctgaggagaggacgaagcgaagcggacagtgataaaaatgcaaccatcttggaactaaggagccagctgcagatcagcaacaaccggaccctggaactgcaggggctgattaatgatttacagagagagagggaaaatttgagacaggaaattgagaaattccaaaagcaggctttagaggcatctaataggattcaggaatcaaagaatcagtgtactcaggtggtacaggaaagagagagccttctggtgaaaatcaaagtcctggagcaagacaaggcaaggctgcagaggctggaggatgagctgaatcgtgcaaaatcaactctagaggcagaaaccagggtgaaacagcgcctggagtgtgagaaacagcaaattcagaatgacctgaatcagtggaagactcaatattcccgcaaggaggaggctattaggaagatagaatcggaaagagaaaagagtgagagagagaagaacagtcttaggagtgagatcgaaagactccaagcagagatcaagagaattgaagagaggtgcaggcgtaagctggaggattctaccagggagacacagtcacagttagaaacagaacgctcccgatatcagagggagattgataaactcagacagcgcccatatgggtcccatcgagagacccagactgagtgtgagtggaccgttgacacctccaagctggtgtttgatgggctgaggaagaaggtgacagcaatgcagctctatgagtgtcagctgatcgacaaaacaaccttggacaaactattgaaggggaagaagtcagtggaagaagttgcttctgaaatccagccattccttcggggtgcaggatctatcgctggagcatctgcttctcctaaggaaaaatactctttggtagaggccaagagaaagaaattaatcagcccagaatccacagtcatgcttctggaggcccaggcagctacaggtggtataattgatccccatcggaatgagaagctgactgtcgacagtgccatagctcgggacctcattgacttcgatgaccgtcagcagatatatgcagcagaaaaagctatcactggttttgatgatccattttcaggcaagacagtatctgtttcagaagccatcaagaaaaatttgattgatagagaaaccggaatgcgcctgctggaagcccagattgcttcagggggtgtagtagaccctgtgaacagtgtctttttgccaaaagatgtcgccttggcccgggggctgattgatagagatttgtatcgatccctgaatgatccccgagatagtcagaaaaactttgtggatccagtcaccaaaaagaaggtcagttacgtgcagctgaaggaacggtgcagaatcgaaccacatactggtctgctcttgctttcagtacagaagagaagcatgtccttccaaggaatcagacaacctgtgaccgtcactgagctagtagattctggtatattgagaccgtccactgtcaatgaactggaatctggtcagatttcttatgacgaggttggtgagagaattaaggacttcctccagggttcaagctgcatagcaggcatatacaatgagaccacaaaacagaagcttggcatttatgaggccatgaaaattggcttagtccgacctggtactgctctggagttgctggaagcccaagcagctactggctttatagtggatcctgttagcaacttgaggttaccagtggaggaagcctacaagagaggtctggtgggcattgagttcaaagagaagctcctgtctgcagaacgagctgtcactgggtataatgatcctgaaacaggaaacatcatctctttgttccaagccatgaataaggaactcatcgaaaagggccacggtattcgcttattagaagcacagatcgcaaccggggggatcattgacccaaaggagagccatcgtttaccagttgacatagcatataagaggggctatttcaatgaggaactcagtgagattctctcagatccaagtgatgataccaaaggattttttgaccccaacactgaagaaaatcttacctatctgcaactaaaagaaagatgcattaaggatgaggaaacagggctctgtcttctgcctctgaaagaaaagaagaaacaggtgcagacatcacaaaagaataccctcaggaagcgtagagtggtcatagttgacccagaaaccaataaagaaatgtctgttcaggaggcctacaagaagggcctaattgattatgaaaccttcaaagaactgtgtgagcaggaatgtgaatgggaagaaataaccatcacgggatcagatggctccaccagggtggtcctggtagatagaaagacaggcagtcagtatgatattcaagatgctattgacaagggccttgttgacaggaagttctttgatcagtaccgatccggcagcctcagcctcactcaatttgctgacatgatctccttgaaaaatggtgtcggcaccagcagcagcatgggcagtggtgtcagcgatgatgtttttagcagctcccgacatgaatcagtaagtaagatttccaccatatccagcgtcaggaatttaaccataaggagcagctctttttcagacaccctggaagaatcgagccccattgcagccatctttgacacagaaaacctggagaaaatctccattacagaaggtatagagcggggcatcgttgacagcatcacgggtcagaggcttctggaggctcaggcctgcacaggtggcatcatccacccaaccacgggccagaagctgtcacttcaggacgcagtctcccagggtgtgattgaccaagacatggccaccaggctgaagcctgctcagaaagccttcataggcttcgagggtgtgaagggaaagaagaagatgtcagcagcagaggcagtgaaagaaaaatggctcccgtatgaggctggccagcgcttcctggagttccagtacctcacgggaggtcttgttgacccggaagtgcatgggaggataagcaccgaagaagccatccggaaggggttcatagatggccgcgccgcacagaggctgcaagacaccagcagctatgccaaaatcctgacctgccccaaaaccaaattaaaaatatcctataaggatgccataaatcgctccatggtagaagatatcactgggctgcgccttctggaagccgcctccgtgtcgtccaagggcttacccagcccttacaacatgtcttcggctccggggtcccgctccggctcccgctcgggatctcgctccggatctcgctccgggtcccgcagtgggtcccggagaggaagctttgacgccacagggaattcttcctactcttattcctactcatttagcagtagttctattgggcactag

SEQ ID NO: 2 - protein, 2871 aa, Homo sapiens
MSCNGGSHPRINTLGRMIRAESGPDLRYEVTSGGGGTSRMYYSRRGVITDQNSDGYCQTGTMSRHQNQNTIQELLQNCSDCLMRAELIVQPELKYGDGIQLTRSRELDECFAQANDQMEILDSLIREMRQMGQPCDAYQKRLLQLQEQMRALYKAISVPRVRRASSKGGGGYTCQSGSGWDEFTKHVTSECLGWMRQQRAEMDMVAWGVDLASVEQHINSHRGIHNSIGDYRWQLDKIKADLREKSAIYQLEEEYENLLKASFERMDHLRQLQNIIQATSREIMWINDCEEEELLYDWSDKNTNIAQKQEAFSIRMSQLEVKEKELNKLKQESDQLVLNQHPASDKIEAYMDTLQTQWSWILQITKCIDVHLKENAAYFQFFEEAQSTEAYLKGLQDSIRKKYPCDKNMPLQHLLEQIKELEKEREKILEYKRQVQNLVNKSKKIVQLKPRNPDYRSNKPIILRALCDYKQDQKIVHKGDECILKDNNERSKWYVTGPGGVDMLVPSVGLIIPPPNPLAVDLSCKIEQYYEAILALWNQLYINMKSLVSWHYCMIDIEKIRAMTIAKLKTMRQEDYMKTIADLELHYQEFIRNSQGSEMFGDDDKRKIQSQFTDAQKHYQTLVIQLPGYPQHQTVTTTEITHHGTCQDVNHNKVIETNRENDKQETWMLMELQKIRRQIEHCEGRMTLKNLPLADQGSSHHITVKINELKSVQNDSQAIAEVLNQLKDMLANFRGSEKYCYLQNEVFGLFQKLENINGVTDGYLNSLCTVRALLQAILQTEDMLKVYEARLTEEETVCLDLDKVEAYRCGLKKIKNDLNLKKSLLATMKTELQKAQQIHSQTSQQYPLYDLDLGKFGEKVTQLTDRWQRIDKQIDFRLWDLEKQIKQLRNYRDNYQAFCKWLYDAKRRQDSLESMKFGDSNTVMRFLNEQKNLHSEISGKRDKSEEVQKIAELCANSIKDYELQLASYTSGLETLLNIPIKRTMIQSPSGVILQEAADVHARYIELLTRSGDYYRFLSEMLKSLEDLKLKNTKIEVLEEELRLARDANSENCNKNKFLDQNLQKYQAECSQFKAKLASLEELKRQAELDGKSAKQNLDKCYGQIKELNEKITRLTYEIEDEKRRRKSVEDRFDQQKNDYDQLQKARQCEKENLGWQKLESEKAIKEKEYEIERLRVLLQEEGTRKREYENELAKVRNHYNEEMSNLRNKYETEINITKTTIKEISMQKEDDSKNLRNQLDRLSRENRDLKDEIVRLNDSILQATEQRRRAEENALQQKACGSEIMQKKQHLEIELKQVMQQRSEDNARHKQSLEEAAKTIQDKNKEIERLKAEFQEEAKRRWEYENELSKVRNNYDEEIISLKNQFETEINITKTTIHQLTMQKEEDTSGYRAQIDNLTRENRSLSEEIKRLKNTLTQTTENLRRVEEDIQQQKATGSEVSQRKQQLEVELRQVTQMRTEESVRYKQSLDDAAKTIQDKNKEIERLKQLIDKETNDRKCLEDENARLQRVQYDLQKANSSATETINKLKVQEQELTRLRIDYERVSQERTVKDQDITRFQNSLKELQLQKQKVEEELNRLKRTASEDSCKRKKLEEELEGMRRSLKEQAIKITNLTQQLEQASIVKKRSEDDLRQQRDVLDGHLREKQRTQEELRRLSSEVEALRRQLLQEQESVKQAHLRNEHFQKAIEDKSRSLNESKIEIERLQSLTENLTKEHLMLEEELRNLRLEYDDLRRGRSEADSDKNATILELRSQLQISNNRTLELQGLINDLQRERENLRQEIEKFQKQALEASNRIQESKNQCTQVVQERESLLVKIKVLEQDKARLQRLEDELNRAKSTLEAETRVKQRLECEKQQIQNDLNQWKTQYSRKEEAIRKIESEREKSEREKNSLRSEIERLQAEIKRIEERCRRKLEDSTRETQSQLETERSRYQREIDKLRQRPYGSHRETQTECEWTVDTSKLVFDGLRKKVTAMQLYECQLIDKTTLDKLLKGKKSVEEVASEIQPFLRGAGSIAGASASPKEKYSLVEAKRKKLISPESTVMLLEAQAATGGIIDPHRNEKLTVDSAIARDLIDFDDRQQIYAAEKAITGFDDPFSGKTVSVSEAIKKNLIDRETGMRLLEAQIASGGVVDPVNSVFLPKDVALARGLIDRDLYRSLNDPRDSQKNFVDPVTKKKVSYVQLKERCRIEPHTGLLLLSVQKRSMSFQGIRQPVTVTELVDSGILRPSTVNELESGQISYDEVGERIKDFLQGSSCIAGIYNETTKQKLGIYEAMKIGLVRPGTALELLEAQAATGFIVDPVSNLRLPVEEAYKRGLVGIEFKEKLLSAERAVTGYNDPETGNIISLFQAMNKELIEKGHGIRLLEAQIATGGIIDPKESHRLPVDIAYKRGYFNEELSEILSDPSDDTKGFFDPNTEENLTYLQLKERCIKDEETGLCLLPLKEKKKQVQTSQKNTLRKRRVVIVDPETNKEMSVQEAYKKGLIDYETFKELCEQECEWEEITITGSDGSTRVVLVDRKTGSQYDIQDAIDKGLVDRKFFDQYRSGSLSLTQFADMISLKNGVGTSSSMGSGVSDDVFSSSRHESVSKISTISSVRNLTIRSSSFSDTLEESSPIAAIFDTENLEKISITEGIERGIVDSITGQRLLEAQACTGGIIHPTTGQKLSLQDAVSQGVIDQDMATRLKPAQKAFIGFEGVKGKKKMSAAEAVKEKWLPYEAGQRFLEFQYLTGGLVDPEVHGRISTEEAIRKGFIDGRAAQRLQDTSSYAKILTCPKTKLKISYKDAINRSMVEDITGLRLLEAASVSSKGLPSPYNMSSAPGSRSGSRSGSRSGSRSGSRSGSRRGSFDATGNSSYSYSYSFSSSSIGH

SEQ ID NO: 3 - DNA, 867 bp, Homo sapiens
  CDS (1)..(867)
gagccacatactggtctgctcttgctttcagtacagaagagaagcatgtccttccaaggaatcagacaacctgtgaccgtcactgagctagtagattctggtatattgagaccgtccactgtcaatgaactggaatctggtcagatttcttatgacgaggttggtgagagaattaaggacttcctccagggttcaagctgcatagcaggcatatacaatgagaccacaaaacagaagcttggcatttatgaggccatgaaaattggcttagtccgacctggtactgctctggagttgctggaagcccaagcagctactggctttatagtggatcctgttagcaacttgaggttaccagtggaggaagcctacaagagaggtctggtgggcattgagttcaaagagaagctcctgtctgcagaacgagctgtcactgggtataatgatcctgaaacaggaaacatcatctctttgttccaagccatgaataaggaactcatcgaaaagggccacggtattcgcttattagaagcacagatcgcaaccggggggatcattgacccaaaggagagccatcgtttaccagttgacatagcatataagaggggctatttcaatgaggaactcagtgagattctctcagatccaagtgatgataccaaaggattttttgaccccaacactgaagaaaatcttacctatctgcaactaaaagaaagatgcattaaggatgaggaaacagggctctgtcttctgcctctgaaagaaaagaagaaacaggtgcagacatcacaaaagaataccctcaggaagcgtagagtggtcatagttgacccagaaaccaataaagaaatgtctgttcaggag

SEQ ID NO: 4 - protein, 289 aa, Homo sapiens
EPHTGLLLLSVQKRSMSFQGIRQPVTVTELVDSGILRPSTVNELESGQISYDEVGERIKDFLQGSSCIAGIYNETTKQKLGIYEAMKIGLVRPGTALELLEAQAATGFIVDPVSNLRLPVEEAYKRGLVGIEFKEKLLSAERAVTGYNDPETGNIISLFQAMNKELIEKGHGIRLLEAQIATGGIIDPKESHRLPVDIAYKRGYFNEELSEILSDPSDDTKGFFDPNTEENLTYLQLKERCIKDEETGLCLLPLKEKKKQVQTSQKNTLRKRRVVIVDPETNKEMSVQE

SEQ ID NO: 5 - DNA, 768 bp, Homo sapiens
  CDS (1)..(768)
gaaccacatactggtctgctcttgctttcagtacagaagagaagcatgtccttccaaggaatcagacaacctgtgaccgtcactgagctagtagattctggtatattgagaccgtccactgtcaatgaactggaatctggtcagatttcttatgacgaggttggtgagagaattaaggacttcctccagggttcaagctgcatagcaggcatatacaatgagaccacaaaacagaagcttggcatttatgaggccatgaaaattggcttagtccgacctggtactgctctggagttgctggaagcccaagcagctactggctttatagtggatcctgttagcaacttgaggttaccagtggaggaagcctacaagagaggtctggtgggcattgagttcaaagagaagctcctgtctgcagaacgagctgtcactgggtataatgatcctgaaacaggaaacatcatctctttgttccaagccatgaataaggaactcatcgaaaagggccacggtattcgcttattagaagcacagatcgcaaccggggggatcattgacccaaaggagagccatcgtttaccagttgacatagcatataagaggggctatttcaatgaggaactcagtgagattctctcagatccaagtgatgataccaaaggattttttgaccccaacactgaagaaaatcttacctatctgcaactaaaagaaagatgcattaaggatgaggaaacagggctctgtcttctgcctctgaaagaa

SEQ ID NO: 6 - protein, 256 aa, Homo sapiens
EPHTGLLLLSVQKRSMSFQGIRQPVTVTELVDSGILRPSTVNELESGQISYDEVGERIKDFLQGSSCIAGIYNETTKQKLGIYEAMKIGLVRPGTALELLEAQAATGFIVDPVSNLRLPVEEAYKRGLVGIEFKEKLLSAERAVTGYNDPETGNIISLFQAMNKELIEKGHGIRLLEAQIATGGIIDPKESHRLPVDIAYKRGYFNEELSEILSDPSDDTKGFFDPNTEENLTYLQLKERCIKDEETGLCLLPLKE

SEQ ID NO: 7 - DNA, 720 bp, Homo sapiens
  CDS (1)..(720)
tccttccaaggaatcagacaacctgtgaccgtcactgagctagtagattctggtatattgagaccgtccactgtcaatgaactggaatctggtcagatttcttatgacgaggttggtgagagaattaaggacttcctccagggttcaagctgcatagcaggcatatacaatgagaccacaaaacagaagcttggcatttatgaggccatgaaaattggcttagtccgacctggtactgctctggagttgctggaagcccaagcagctactggctttatagtggatcctgttagcaacttgaggttaccagtggaggaagcctacaagagaggtctggtgggcattgagttcaaagagaagctcctgtctgcagaacgagctgtcactgggtataatgatcctgaaacaggaaacatcatctctttgttccaagccatgaataaggaactcatcgaaaagggccacggtattcgcttattagaagcacagatcgcaaccggggggatcattgacccaaaggagagccatcgtttaccagttgacatagcatataagaggggctatttcaatgaggaactcagtgagattctctcagatccaagtgatgataccaaaggattttttgaccccaacactgaagaaaatcttacctatctgcaactaaaagaaagatgcattaaggatgaggaaacagggctctgtcttctgcctctgaaagaa

SEQ ID NO: 8 - protein, 240 aa, Homo sapiens
SFQGIRQPVTVTELVDSGILRPSTVNELESGQISYDEVGERIKDFLQGSSCIAGIYNETTKQKLGIYEAMKIGLVRPGTALELLEAQAATGFIVDPVSNLRLPVEEAYKRGLVGIEFKEKLLSAERAVTGYNDPETGNIISLFQAMNKELIEKGHGIRLLEAQIATGGIIDPKESHRLPVDIAYKRGYFNEELSEILSDPSDDTKGFFDPNTEENLTYLQLKERCIKDEETGLCLLPLKE

SEQ ID NO: 9 - DNA, 798 bp, Homo sapiens
  CDS (1)..(798)
agcagctctttttcagacaccctggaagaatcgagccccattgcagccatctttgacacagaaaacctggagaaaatctccattacagaaggtatagagcggggcatcgttgacagcatcacgggtcagaggcttctggaggctcaggcctgcacaggtggcatcatccacccaaccacgggccagaagctgtcacttcaggacgcagtctcccagggtgtgattgaccaagacatggccaccaggctgaagcctgctcagaaagccttcataggcttcgagggtgtgaagggaaagaagaagatgtcagcagcagaggcagtgaaagaaaaatggctcccgtatgaggctggccagcgcttcctggagttccagtacctcacgggaggtcttgttgacccggaagtgcatgggaggataagcaccgaagaagccatccggaaggggttcatagatggccgcgccgcacagaggctgcaagacaccagcagctatgccaaaatcctgacctgccccaaaaccaaattaaaaatatcctataaggatgccataaatcgctccatggtagaagatatcactgggctgcgccttctggaagccgcctccgtgtcgtccaagggcttacccagcccttacaacatgtcttcggctccggggtcccgctccggctcccgctcgggatctcgctccggatctcgctccgggtcccgcagtgggtcccggagaggaagctttgacgccacagggaattcttcctactcttattcctactcatttagcagtagttctattgggcac

SEQ ID NO: 10 - protein, 266 aa, Homo sapiens
SSSFSDTLEESSPIAAIFDTENLEKISITEGIERGIVDSITGQRLLEAQACTGGIIHPTTGQKLSLQDAVSQGVIDQDMATRLKPAQKAFIGFEGVKGKKKMSAAEAVKEKWLPYEAGQRFLEFQYLTGGLVDPEVHGRISTEEAIRKGFIDGRAAQRLQDTSSYAKILTCPKTKLKISYKDAINRSMVEDITGLRLLEAASVSSKGLPSPYNMSSAPGSRSGSRSGSRSGSRSGSRSGSRRGSFDATGNSSYSYSYSFSSSSIGH

SEQ ID NO: 11 - DNA, 768 bp, Homo sapiens
  CDS (1)..(768)
tcgagccccattgcagccatctttgacacagaaaacctggagaaaatctccattacagaaggtatagagcggggcatcgttgacagcatcacgggtcagaggcttctggaggctcaggcctgcacaggtggcatcatccacccaaccacgggccagaagctgtcacttcaggacgcagtctcccagggtgtgattgaccaagacatggccaccaggctgaagcctgctcagaaagccttcataggcttcgagggtgtgaagggaaagaagaagatgtcagcagcagaggcagtgaaagaaaaatggctcccgtatgaggctggccagcgcttcctggagttccagtacctcacgggaggtcttgttgacccggaagtgcatgggaggataagcaccgaagaagccatccggaaggggttcatagatggccgcgccgcacagaggctgcaagacaccagcagctatgccaaaatcctgacctgccccaaaaccaaattaaaaatatcctataaggatgccataaatcgctccatggtagaagatatcactgggctgcgccttctggaagccgcctccgtgtcgtccaagggcttacccagcccttacaacatgtcttcggctccggggtcccgctccggctcccgctcgggatctcgctccggatctcgctccgggtcccgcagtgggtcccggagaggaagctttgacgccacagggaattcttcctactcttattcctactcatttagcagtagttctattgggcac

SEQ ID NO: 12 - protein, 256 aa, Homo sapiens
SSPIAAIFDTENLEKISITEGIERGIVDSITGQRLLEAQACTGGIIHPTTGQKLSLQDAVSQGVIDQDMATRLKPAQKAFIGFEGVKGKKKMSAAEAVKEKWLPYEAGQRFLEFQYLTGGLVDPEVHGRISTEEAIRKGFIDGRAAQRLQDTSSYAKILTCPKTKLKISYKDAINRSMVEDITGLRLLEAASVSSKGLPSPYNMSSAPGSRSGSRSGSRSGSRSGSRSGSRRGSFDATGNSSYSYSYSFSSSSIGH

SEQ ID NO: 13 - DNA, 588 bp, Homo sapiens
  CDS (1)..(588)
tcgagccccattgcagccatctttgacacagaaaacctggagaaaatctccattacagaaggtatagagcggggcatcgttgacagcatcacgggtcagaggcttctggaggctcaggcctgcacaggtggcatcatccacccaaccacgggccagaagctgtcacttcaggacgcagtctcccagggtgtgattgaccaagacatggccaccaggctgaagcctgctcagaaagccttcataggcttcgagggtgtgaagggaaagaagaagatgtcagcagcagaggcagtgaaagaaaaatggctcccgtatgaggctggccagcgcttcctggagttccagtacctcacgggaggtcttgttgacccggaagtgcatgggaggataagcaccgaagaagccatccggaaggggttcatagatggccgcgccgcacagaggctgcaagacaccagcagctatgccaaaatcctgacctgccccaaaaccaaattaaaaatatcctataaggatgccataaatcgctccatggtagaagatatcactgggctgcgccttctggaagccgcctccgtgtcgtccaag

SEQ ID NO: 14 - protein, 196 aa, Homo sapiens
SSPIAAIFDTENLEKISITEGIERGIVDSITGQRLLEAQACTGGIIHPTTGQKLSLQDAVSQGVIDQDMATRLKPAQKAFIGFEGVKGKKKMSAAEAVKEKWLPYEAGQRFLEFQYLTGGLVDPEVHGRISTEEAIRKGFIDGRAAQRLQDTSSYAKILTCPKTKLKISYKDAINRSMVEDITGLRLLEAASVSSK

SEQ ID NO: 15 - DNA, 12186 bp, Homo sapiens
  CDS (1)..(12186)
atgtctactctcctggaaaacatctttgccataattaatcttttcaagcaatattcaaaaaaagataaaaacactgacacattgagtaaaaaagagctgaaggaacttctggaaaaggaatttcggcaaatcctgaagaatccagatgacccagatatggttgatgtcttcatggatcacttggatatagaccacaacaagaaaattgacttcactgagtttcttctgatggtattcaagttggctcaagcatattatgagtctaccagaaaagagaatttaccgatatcaggacacaagcacagaaagcacagtcatcatgataaacatgaagataataaacaggaagaaaacaaagaaaacagaaaaagaccctcaagtctggaaagaagaaacaatagaaaagggaataagggaagatccaagagcccaagagaaacaggggggaaaaggcatgaatctagttctgaaaaaaaagaaagaaaaggatattcacctactcatagagaagaagaatatggaaaaaaccatcataactcaagtaaaaaagagaaaaacaagactgaaaatactagattaggagacaataggaagaggctaagtgaaagacttgaagagaaagaagacaatgaagaaggagtatatgattatgaaaatacaggaagaatgactcaaaaatggatacaatcaggccatattgccacatattacacaatccaggatgaagcctatgacaccactgatagtctattagaagaaaacaaaatatatgaaagatcaaggtcatctgatggcaaatcatcatctcaagtgaacaggtcaagacatgaaaatacaagccaggtaccattgcaggagtccaggacaagaaagcgtaggggatccagagttagccaggacagggacagtgagggacactcagaagactctgagaggcactctgggtcggcttccagaaaccatcatggatctgcgtgggagcagtcaagagatggctccagacaccccaggtcccatgatgaagacagagccagtcatgggcactctgcagacagctccagacaatcaggcactcgtcacgcagagacttcctctcgtggacagactgcatcatcccatgaacaggcaagatcaagtccaggagaaagacatggatccggccaccagcagtcagcagacagctccagacactcagccactgggcgcgggcaagcttcatctgcagtcagcgatcgtggacaccgggggtctagcggtagtcaggccagtgacagtgagggacattcagaaaactcagacacacaatcagtgtcaggccacggaaaggctgggctgagacagcagagccaccaagagtccacacgtggccggtcaggggaacggtctggacgttcagggtcttccctctaccaggtgagcactcatgaacagcctgactctgcccatggacggaccgggaccagcactggaggaagacaaggatcgcaccacgagcaggcacgagacagctccaggcattcagcgtcccaagagggtcaggacaccattcgtggacacccggggtcaagcagaggaggaaggcagggatcccaccacgagcaatcggtaaataggtctggacactcaggttcccatcacagccacaccacatcccagggaaggtctgatgcctcccatgggcagtcaggatccagaagtgcaagcagacaaacacgaaatgaggaacaatcaggagacggcaccaggcactcagggtcacgtcatcatgaagcttcctctcaggctgacagctctagacactcacaggtgggccagggacaatcatcggggcccaggacaagtaggaaccagggatccagtgttagccaggacagtgacagtcagggacactcagaagactctgagaggtggtctgggtctgcttccagaaaccatcatggatctgctcaggagcagtcaagagatggctccagacaccccaggtcccatcacgaagacagagctggtcatgggcactctgcagacagctccagaaaatcaggcactcgtcacacacagaattcctctagtggacaggctgcgtcatcccatgaacaggcaagatcaagtgcaggagaaagacatggatcccgccaccagctccagtcagcagacagctccagacactcaggcactgggcacggacaagcttcatctgcagtcagagacagtggacaccgagggtccagtggtagtcaggccactgacagtgagggacattcagaagactcagacacacagtcagtgtcaggccatggacaggctggtcaccatcagcagagccaccaagagtccgcacgtgaccggtcaggggaaaggtctcgacgttcagggtctttcctctaccaggtgagcactcataaacagtctgagtcctcccatggatggacagggcccagcactggagtaagacaaggatcccaccatgagcaggcacgagacaactccaggcactcagcatcccaagatggtcaggacaccattcgtggacacccggggtcaagcagaagaggaaggcaggggtcccaccacgagcaatcggtagataggtctggacactcagggtcccatcacagccacaccacatcccagggaaggtctgatgcctcccgtgggcagtcaggatccagaagtgcaagcagaacaacacgtaatgaggaacaatcaagagacggctccaggcactcagggtcacgtcaccatgaagcttcctctcatgccgacatctctagacactcacaggcaggccagggacaatcagaggggtccaggacaagcaggcgccagggatccagtgttagccaggacagtgacagtgagggacattcagaagactctgagaggtggtctgggtctgcttccagaaaccatcgtggatctgctcaggagcagtcaagacatggctccagacaccccaggtcccatcacgaagacagagccggtcacgggcactctgcagacagctccagacaatcaggaactcctcacgcagagacttcctctggtggacaggctgcgtcatcccatgaacaggcaagatcaagtccaggagaaagacacggatcccgccaccagcagtcagcagacagctccagacactcaggcattccgcgcagacaagcttcatctgcagtcagagacagtggacactgggggtccagtggtagtcaggccagtgatagtgagggacattcagaggagtcagacacacagtcagtgtcaggccatggacaggatgggccccatcagcagagccaccaagagtccgcacgtgactggtcagggggaaggtctggacgttcagggtctttcatctaccaggtgagcactcatgaacagtctgagtctgcccatgggcggaccaggaccagcactggacgaagacaaggatcccaccacgagcaggcacgagacagctccaggcactcagcgtcccaagagggtcaggacaccattcgtgcacacccggggtcaaggagaggaggaaggcagggatcccaccatgagcaatcggtagatagatctggacactcagggtcccatcacagccacaccacatcccagggaaggtctgatgcctcccatgggcagtcaggatccagaagtgcaagcagacaaactcgtaaggacaaacaatcaggagacggctccaggcactcagggtcacgtcaccatgaagctgcctcttgggctgacagctctagacactcacaggtgggacaggaacaatcatcggggtccaggacaagcaggcaccagggatccagtgttagccaggacagtgacagtgagagacactcagacgactccgagaggttgtctgggtctgcttccagaaaccatcatggatcttctcgggagcagtcaagagatggctccagacaccctgggttccatcaagaagacagagccagtcacgggcactctgcagacagctccagacaatcaggcactcatcacacagagtcttcctctcatggacaggctgtgtcatcccatgaacaggcaagatcaagtccaggagaaagacatggatcccgccaccagcagtcagcagacagctccagacactcaggcattgggcacagacaagcttcatctgcagtcagagacagtggacaccgagggtccagtggtagtcaggtcactaacagtgagggacattcagaagactcagacacacagtcagtgtcagcccacggacaagctgggccccatcagcagagccacaaagagtccgcacgtggccagtcaggggaaagctctggacgttcaaggtctttcctctaccaggtgagctctcatgaacagtctgagtccacacacggacagactgcacccagcactggaggaagacaaggatcccgccatgagcaggcacgaaacagctctaggcactcagcatcccaagacggtcaggacaccattcgtggacacccggggtcaagcagaggaggaaggcagggatcctaccacgagcaatcagtagataggtctggacactcagggtaccatcacagccacaccacaccccagggaaggtctgatgcctcccatgggcagtcaggacccagaagtgcaagcaggcaaacaagaaatgaggaacaatcaggagacggctccaggcactcagggtcacgtcaccatgaaccttccactcgggccggcagctctagacactcacaggtgggccagggagaatcagcggggtccaagacaagcaggcgccagggatccagtgttagtcaggacagggacagtgagggacactcagaagactctgagaggcggtctgagtcggcttccagaaaccattatggatctgctcgggagcagtcaagacatggctccaggaaccccaggtcccatcaagaagatagagccagtcatgggcactctgcagagagctccagacaatcaggcactcgtcatgcagagacttcctctggtggacaggctgcatcatcccaggaacaggcaaggtcaagtccaggagaaagacatggatcccgccaccagcagtcagcagacagctccacagactcaggcactgggcgcagacaagattcatctgtagtcggagacagtggaaaccgagggtccagtggtagccaggccagtgacagcgagggacactcagaagagtcagacacacagtcagtgtcagcccacggacaggctgggccccatcagcagagccaccaagagtccacacgtggccagtcaggggaaaggtctggacgttcagggtctttcctctaccaggtgagcactcatgaacagtctgagtccgcccatggacgcacagggcccagcactggaggaagacaaagatcccgccacgagcaggcacgagacagctccaggcactcagcgtcccaagagggtcaggacaccattcgtggacacccagggtcaagcagaggaggaaggcagggatcccactatgagcaatcggtagatagttctggacactcagggtctcatcacagccacaccacgtcccaggaaaggtctgatgtctcccgtgggcagtcaggatccagaagtgtcagcagacaaacacgtaatgagaaacaatcaggagacggctccaggcactcagggtcgcgtcaccatgaagcttcctctcgggccgacagctctagacactcgcaggtgggccagggacaatcatcagggcccaggacaagcaggaaccagggatccagtgttagccaggacagtgacagtcagggacactcagaagactctgagaggtggtctgggtctgcttccagaaaccatcttggatctgcttgggagcagtcaagagatggctccagacaccctgggtcccatcacgaagacagagccggtcacgggcactctgcagacagctccagacaatcaggcactcgtcacacagagtcttcctctcgtggacaggctgcgtcatcccatgaacaggcaagatcaagtgcaggagaaagacatggatcccaccaccagctccagtcagcagacagctccagacactcaggcattgggcatggacaagcttcatctgcagtcagagacagtggacaccgagggtacagtggtagtcaggccagtgacagtgagggacattcagaagactcagacacacagtcagtgtcagcacagggaaaagctgggccccatcagcagagccacaaagagtccgcacgtggccagtcaggggaaagctctggacgttcagggtctttcctctaccaggtgagcactcatgaacagtctgagtccacccatggacagtctgcgcccagcactggaggaagacaaggatcccattatgatcaggcacaagacagctccaggcactcagcatcccaagagggtcaggacaccattcgtggacacccggggccaagcagaggaggaagacaggggtcccaccaagagcaatcggtagataggtctggacactcagggtctcatcacagccacaccacatcccagggaaggtctgatgcctcccgtgggcagtcaggatccagaagtgcaagcagaaaaacatatgacaaggaacaatcaggagatggctctaggcactcagggtcgcatcatcatgaagcttcctcttgggccgacagctctagacactcactggtgggccagggacaatcatcagggcccaggacaagcaggccccggggatccagtgttagccaggacagtgacagtgagggacactcagaagattctgagaggcggtctgggtctgcgtccagaaaccatcatggatctgctcaggagcagtcaagagatggctccagacaccccaggtcccatcacgaagacagagccggtcatgggcactctgcagagagctccagacaatcaggcactcatcatgcagagaattcctctggtggacaggctgcatcatcccatgaacaggcaagatcaagtgcaggagagagacacggatcccaccaccagcagtcagcagacagctccagacactcaggcattgggcacggacaagcttcatctgcagtcagagacagtggacaccgagggtccagtggtagtcaggccagtgacagtgagggacattcagaagactcagacacacagtcagtgtcagcccacggacaggctgggccccatcagcagagccaccaagagtccacacgtggccggtcagcaggaaggtctggacgttcagggtctttcctctaccaggtgagcactcatgaacagtctgagtccgcccatggacggaccgggaccagcactggaggaagacaaggatcccaccacaagcaggcacgagacagctccaggcactcaacgtcccaagagggtcaggacaccattcatggacacccggggtcaagcagtggaggaaggcagggatcccactacgagcaattggtagatagatctggacactcagggtctcatcacagccacaccacatcccagggaaggtctgatgcctcccatgggcactcaggatccagaagtgcaagcagacaaactcgtaacgatgaacaatcaggagacggctccaggcactcagggtcgcgtcaccatgaagcttcctctcgggccgacagctctggacactcgcaggtgggccagggacaatcagaggggcccaggacaagcaggaactggggatccagttttagccaggacagtgacagtcagggacactcagaagactctgagaggtggtctgggtctgcttccagaaaccatcatggatctgctcaggagcagctaagagatggctccagacaccccaggtcccatcaagaagacagagctggtcatgggcactctgcagacagctccagacaatcaggcactcgtcacacacagacttcctctggtggacaggctgcatcatcccatgaacaggcaagatcaagtgcaggagaaagacatggatcccaccaccagcagtcagcagacagctccagacactcaggcattgggcacggacaagcttcatctgcagtcagagacagtggacaccgagggtacagtggtagtcaggccagtgacaatgagggacattcagaagactcagacacacagtcagtgtcagcccacggacaggctgggtcccatcagcagagccaccaagagtccgcacgtggccggtcaggggaaacgtctggacattcaggatctttcctctaccaggtgagcactcatgaacagtctgagtcctcccatggatggacggggcccagcactagaggaagacaaggatcccgccatgagcaggcacaagacagctccaggcactcagcatcccaagacggtcaggacaccattcgtggacacccggggtcaagcagaggaggaaggcaggggtaccaccacgagcattcggtagatagctctggacactcagggtcccatcacagccacaccacatcccagggaaggtctgatgcctcccgtgggcagtcaggatccagaagtgcaagcagaacaacacgtaatgaggaacaatcaggagacggctccaggcactcagggtcgcgtcaccatgaagcttccactcatgccgacatctctagacactcacaggcagtccagggacaatcagaggggtccaggagaagcaggcgccagggatccagtgtgagccaggacagtgacagtgagggacattcagaagactctgagaggtggtctgggtctgcttccagaaaccatcatggatctgctcaggagcagctaagagatggctccagacaccccaggtcccatcaagaagacagagctggtcatgggcactctgcagacagctccagacaatcaggcactcgtcacacacagacttcctctggtggacaggctgcatcatcccatgaacaggcaagatcaagtgcaggagaaagacatggatcccaccaccagcagtcagcagacagctccagacactcaggcattgggcacggacaagcttcatctgcagtcagagacagtggacaccgagggtacagtggtagtcaggccagtgacaatgagggacattcagaagactcagacacacagtcagtgtcagcccacggacaggctgggtcccatcagcagagccaccaagagtccgcacgtggccggtcaggggaaacgtctggacattcaggatctttcctctaccaggtgagcactcatgaacagtctgagtcctcccatggatggacggggcccagcactagaggaagacaaggatcccgccatgagcaggcacaagacagctccaggcactcagcatcccaatacggtcaggacaccattcgtggacacccggggtcaagcagaggaggaaggcaggggtaccaccacgagcattcggtagatagctctggacactcagggtcccatcacagccacaccacatcccagggaaggtctgatgcctcccgtgggcagtcaggatccagaagtgcaagcagaacaacacgtaatgaggaacaatcaggagacagctccaggcactcagtgtcacgtcaccatgaagcttccactcatgccgacatctctagacactcacaggcagtccagggacaatcagaggggtccaggagaagcaggcgccagggatccagtgtgagccaggacagtgacagtgagggacattcagaagactctgagaggtggtctgggtctgcttccagaaaccatcgtggatctgttcaggagcagtcaaggcacggctccagacaccccaggtcccatcacgaagacagagccggtcacgggcactctgcagaccgctccagacaatcaggcactcgtcacgcagagacttcctctggtggacaggctgcatcatcccatgaacaggcaagatcaagtccaggagagagacacggatcccgccaccagcagtcagcagacagctccagacactcaggcattccgcgtggacaagcttcatctgcagtcagagacagtagacactgggggtccagtggtagtcaggccagtgatagtgagggacattcagaagagtcagacacacagtcagtgtcaggccatggacaggctgggccccatcagcagagccaccaagagtccgcacgtgaccggtcagggggaaggtctggacgttcagggtctttcctctaccaggtgagcactcatgaacagtctgagtctgcccatgggcggaccaggaccagcactggacgaagacaaggatcccaccacgagcaggcacgagacagctccaggcactcagcgtcccaagagggtcaggacaccattcgtggacacccggggtcaagcagaagaggaaggcagggatcccactacgagcaatcggtagataggtctggacactcagggtcccatcacagccacaccacatcccagggaaggtctgatgcctcccgtgggcagtcaggatccagaagtgccagcagacaaactcgtaatgacgaacaatcaggagatggctccaggcactcatggtcgcatcaccatgaagcttccactcaggcggacagctctagacactcacagtccggccagggacaatcagcggggcccaggacaagcaggaaccagggatccagtgttagccaggacagtgacagtcagggacactcagaagactctgagaggtggtctgggtctgcttccagaaaccatcgtggatctgctcaggagcagtcaagagatggctccagacaccccacgtcccatcacgaagacagagccggtcacgggcactctgcagagagctccagacaatcaggcactcatcatgcagagaattcctctggtggacaggctgcatcatcccatgaacaggcaagatcaagtgcaggagagagacatggatcccaccaccagcagtcagcagacagctccagacactcaggcattgggcacggacaagcttcatctgcagtcagagacagtggacaccgagggtccagtggtagtcaggccagtgacagtgagggacattcagaagactcagacacacagtcagtgtcagcccacggacaggctgggccccatcagcagagccaccaagagtccacacgtggccggtcagcaggaaggtctggacgttcagggtctttcctctaccaggtgagcactcatgaacagtctgagtctgcccatggacgggctgggcccagtactggaggaagacaaggatcccgccacgagcaggcacgagacagctccaggcactcagcgtcccaagagggtcaggacaccattcgtggacacccggggtcaaggagaggaggaagacagggatcctaccacgagcaatcggtagataggtctggacactcagggtcccatcacagccacaccacatcccagggaaggtctgatgcctcccatgggcagtcaggatccagaagtgcaagcagagaaacacgtaatgaggaacagtcaggagacggctccaggcactcagggtcgcgtcaccatgaagcttccactcaggctgacagctctagacactcacagtccggccagggtgaatcagcggggtccaggagaagcaggcgccagggatccagtgttagccaggacagtgacagtgaggcatacccagaggactctgagaggcgatctgagtctgcttccagaaaccatcatggatcttctcgggagcagtcaagagatggctccagacaccccggatcctctcaccgcgatacagccagtcatgtacagtcttcacctgtacagtcagactctagtaccgctaaggaacatggtcactttagtagtctttcacaagattctgcgtatcactcaggaatacagtcacgtggcagtcctcacagttctagttcttatcattatcaatctgagggcactgaaaggcaaaaaggtcaatcaggtttagtttggagacatggcagctatggtagtgcagattatgattatggtgaatccgggtttagacactctcagcacggaagtgttagttacaattccaatcctgttgttttcaaggaaagatctgatatctgtaaagcaagtgcgtttggtaaagatcatccaaggtattatgcaacgtatattaataaggacccaggtttatgtggccattctagtgatatatcgaaacaactgggatttagtcagtcacagagatactattactatgagtaa

SEQ ID NO: 16 - protein, 4061 aa, Homo sapiens
MSTLLENIFAIINLFKQYSKKDKNTDTLSKKELKELLEKEFRQILKNPDDPDMVDVFMDHLDIDHNKKIDFTEFLLMVFKLAQAYYESTRKENLPISGHKHRKHSHHDKHEDNKQEENKENRKRPSSLERRNNRKGNKGRSKSPRETGGKRHESSSEKKERKGYSPTHREEEYGKNHHNSSKKEKNKTENTRLGDNRKRLSERLEEKEDNEEGVYDYENTGRMTQKWIQSGHIATYYTIQDEAYDTTDSLLEENKIYERSRSSDGKSSSQVNRSRHENTSQVPLQESRTRKRRGSRVSQDRDSEGHSEDSERHSGSASRNHHGSAWEQSRDGSRHPRSHDEDRASHGHSADSSRQSGTRHAETSSRGQTASSHEQARSSPGERHGSGHQQSADSSRHSATGRGQASSAVSDRGHRGSSGSQASDSEGHSENSDTQSVSGHGKAGLRQQSHQESTRGRSGERSGRSGSSLYQVSTHEQPDSAHGRTGTSTGGRQGSHHEQARDSSRHSASQEGQDTIRGHPGSSRGGRQGSHHEQSVNRSGHSGSHHSHTTSQGRSDASHGQSGSRSASRQTRNEEQSGDGTRHSGSRHHEASSQADSSRHSQVGQGQSSGPRTSRNQGSSVSQDSDSQGHSEDSERWSGSASRNHHGSAQEQSRDGSRHPRSHHEDRAGHGHSADSSRKSGTRHTQNSSSGQAASSHEQARSSAGERHGSRHQLQSADSSRHSGTGHGQASSAVRDSGHRGSSGSQATDSEGHSEDSDTQSVSGHGQAGHHQQSHQESARDRSGERSRRSGSFLYQVSTHKQSESSHGWTGPSTGVRQGSHHEQARDNSRHSASQDGQDTIRGHPGSSRRGRQGSHHEQSVDRSGHSGSHHSHTTSQGRSDASRGQSGSRSASRTTRNEEQSRDGSRHSGSRHHEASSHADISRHSQAGQGQSEGSRTSRRQGSSVSQDSDSEGHSEDSERWSGSASRNHRGSAQEQSRHGSRHPRSHHEDRAGHGHSADSSRQSGTPHAETSSGGQAASSHEQARSSPGERHGSRHQQSADSSRHSGIPRRQASSAVRDSGHWGSSGSQASDSEGHSEESDTQSVSGHGQDGPHQQSHQESARDWSGGRSGRSGSFIYQVSTHEQSESAHGRTRTSTGRRQGSHHEQARDSSRHSASQEGQDTIRAHPGSRRGGRQGSHHEQSVDRSGHSGSHHSHTTSQGRSDASHGQSGSRSASRQTRKDKQSGDGSRHSGSRHHEAASWADSSRHSQVGQEQSSGSRTSRHQGSSVSQDSDSERHSDDSERLSGSASRNHHGSSREQSRDGSRHPGFHQEDRASHGHSADSSRQSGTHHTESSSHGQAVSSHEQARSSPGERHGSRHQQSADSSRHSGIGHRQASSAVRDSGHRGSSGSQVTNSEGHSEDSDTQSVSAHGQAGPHQQSHKESARGQSGESSGRSRSFLYQVSSHEQSESTHGQTAPSTGGRQGSRHEQARNSSRHSASQDGQDTIRGHPGSSRGGRQGSYHEQSVDRSGHSGYHHSHTTPQGRSDASHGQSGPRSASRQTRNEEQSGDGSRHSGSRHHEPSTRAGSSRHSQVGQGESAGSKTSRRQGSSVSQDRDSEGHSEDSERRSESASRNHYGSAREQSRHGSRNPRSHQEDRASHGHSAESSRQSGTRHAETSSGGQAASSQEQARSSPGERHGSRHQQSADSSTDSGTGRRQDSSVVGDSGNRGSSGSQASDSEGHSEESDTQSVSAHGQAGPHQQSHQESTRGQSGERSGRSGSFLYQVSTHEQSESAHGRTGPSTGGRQRSRHEQARDSSRHSASQEGQDTIRGHPGSSRGGRQGSHYEQSVDSSGHSGSHHSHTTSQERSDVSRGQSGSRSVSRQTRNEKQSGDGSRHSGSRHHEASSRADSSRHSQVGQGQSSGPRTSRNQGSSVSQDSDSQGHSEDSERWSGSASRNHLGSAWEQSRDGSRHPGSHHEDRAGHGHSADSSRQSGTRHTESSSRGQAASSHEQARSSAGERHGSHHQLQSADSSRHSGIGHGQASSAVRDSGHRGYSGSQASDSEGHSEDSDTQSVSAQGKAGPHQQSHKESARGQSGESSGRSGSFLYQVSTHEQSESTHGQSAPSTGGRQGSHYDQAQDSSRHSASQEGQDTIRGHPGPSRGGRQGSHQEQSVDRSGHSGSHHSHTTSQGRSDASRGQSGSRSASRKTYDKEQSGDGSRHSGSHHHEASSWADSSRHSLVGQGQSSGPRTSRPRGSSVSQDSDSEGHSEDSERRSGSASRNHHGSAQEQSRDGSRHPRSHHEDRAGHGHSAESSRQSGTHHAENSSGGQAASSHEQARSSAGERHGSHHQQSADSSRHSGIGHGQASSAVRDSGHRGSSGSQASDSEGHSEDSDTQSVSAHGQAGPHQQSHQESTRGRSAGRSGRSGSFLYQVSTHEQSESAHGRTGTSTGGRQGSHHKQARDSSRHSTSQEGQDTIHGHPGSSSGGRQGSHYEQLVDRSGHSGSHHSHTTSQGRSDASHGHSGSRSASRQTRNDEQSGDGSRHSGSRHHEASSRADSSGHSQVGQGQSEGPRTSRNWGSSFSQDSDSQGHSEDSERWSGSASRNHHGSAQEQLRDGSRHPRSHQEDRAGHGHSADSSRQSGTRHTQTSSGGQAASSHEQARSSAGERHGSHHQQSADSSRHSGIGHGQASSAVRDSGHRGYSGSQASDNEGHSEDSDTQSVSAHGQAGSHQQSHQESARGRSGETSGHSGSFLYQVSTHEQSESSHGWTGPSTRGRQGSRHEQAQDSSRHSASQDGQDTIRGHPGSSRGGRQGYHHEHSVDSSGHSGSHHSHTTSQGRSDASRGQSGSRSASRTTRNEEQSGDGSRHSGSRHHEASTHADISRHSQAVQGQSEGSRRSRRQGSSVSQDSDSEGHSEDSERWSGSASRNHHGSAQEQLRDGSRHPRSHQEDRAGHGHSADSSRQSGTRHTQTSSGGQAASSHEQARSSAGERHGSHHQQSADSSRHSGIGHGQASSAVRDSGHRGYSGSQASDNEGHSEDSDTQSVSAHGQAGSHQQSHQESARGRSGETSGHSGSFLYQVSTHEQSESSHGWTGPSTRGRQGSRHEQAQDSSRHSASQYGQDTIRGHPGSSRGGRQGYHHEHSVDSSGHSGSHHSHTTSQGRSDASRGQSGSRSASRTTRNEEQSGDSSRHSVSRHHEASTHADISRHSQAVQGQSEGSRRSRRQGSSVSQDSDSEGHSEDSERWSGSASRNHRGSVQEQSRHGSRHPRSHHEDRAGHGHSADRSRQSGTRHAETSSGGQAASSHEQARSSPGERHGSRHQQSADSSRHSGIPRGQASSAVRDSRHWGSSGSQASDSEGHSEESDTQSVSGHGQAGPHQQSHQESARDRSGGRSGRSGSFLYQVSTHEQSESAHGRTRTSTGRRQGSHHEQARDSSRHSASQEGQDTIRGHPGSSRRGRQGSHYEQSVDRSGHSGSHHSHTTSQGRSDASRGQSGSRSASRQTRNDEQSGDGSRHSWSHHHEASTQADSSRHSQSGQGQSAGPRTSRNQGSSVSQDSDSQGHSEDSERWSGSASRNHRGSAQEQSRDGSRHPTSHHEDRAGHGHSAESSRQSGTHHAENSSGGQAASSHEQARSSAGERHGSHHQQSADSSRHSGIGHGQASSAVRDSGHRGSSGSQASDSEGHSEDSDTQSVSAHGQAGPHQQSHQESTRGRSAGRSGRSGSFLYQVSTHEQSESAHGRAGPSTGGRQGSRHEQARDSSRHSASQEGQDTIRGHPGSRRGGRQGSYHEQSVDRSGHSGSHHSHTTSQGRSDASHGQSGSRSASRETRNEEQSGDGSRHSGSRHHEASTQADSSRHSQSGQGESAGSRRSRRQGSSVSQDSDSEAYPEDSERRSESASRNHHGSSREQSRDGSRHPGSSHRDTASHVQSSPVQSDSSTAKEHGHFSSLSQDSAYHSGIQSRGSPHSSSSYHYQSEGTERQKGQSGLVWRHGSYGSADYDYGESGFRHSQHGSVSYNSNPVVFKERSDICKASAFGKDHPRYYATYINKDPGLCGHSSDISKQLGFSQSQRYYYYE

SEQ ID NO: 17 - DNA, 2178 bp, Homo sapiens
  CDS (1)..(2178)
atgaaccactcgccgctcaagaccgccttggcgtacgaatgcttccaggaccaggacaactccacgttggctttgccgtcggaccaaaagatgaaaacaggcacgtctggcaggcagcgcgtgcaggagcaggtgatgatgaccgtcaagcggcagaagtccaagtcttcccagtcgtccaccctgagccactccaatcgaggttccatgtatgatggcttggctgacaattacaactatgggaccaccagcaggagcagctactactccaagttccaggcagggaatggctcatggggatatccgatctacaatggaaccctcaagcgggagcctgacaacaggcgcttcagctcctacagccagatggagaactggagccggcactacccccggggcagctgtaacaccaccggcgcaggcagcgacatctgcttcatgcagaaaatcaaggcgagccgcagtgagcccgacctctactgtgacccacggggcaccctgcgcaagggcacgctgggcagcaagggccagaagaccacccagaaccgctacagcttttacagcacctgcagtggtcagaaggccataaagaagtgccctgtgcgcccgccctcttgtgcctccaagcaggaccctgtgtatatcccgcccatctcctgcaacaaggacctgtcctttggccactctagggccagctccaagatctgcagtgaggacatcgagtgcagtgggctgaccatccccaaggctgtgcagtacctgagctcccaggatgagaagtaccaggccattggggcctattacatccagcatacctgcttccaggatgaatctgccaagcaacaggtctatcagctgggaggcatctgcaagctggtggacctcctccgcagccccaaccagaacgtccagcaggccgcggcaggggccctgcgcaacctggtgttcaggagcaccaccaacaagctggagacccggaggcagaatgggatccgcgaggcagtcagcctcctgaggagaaccgggaacgccgagatccagaagcagctgactgggctgctctggaacctgtcttccactgacgagctgaaggaggaactcattgccgacgccctgcctgttctggccgaccgcgtcatcattcccttctctggctggtgcgatggcaatagcaacatgtcccgggaagtggtggaccctgaggtcttcttcaatgccacaggctgcttgaggaacctgagctcggccgatgcaggccgccagaccatgcgtaactactcagggctcattgattccctcatggcctatgtccagaactgtgtagcggccagccgctgtgacgacaagtctgtggaaaactgcatgtgtgttctgcacaacctctcctaccgcctggacgccgaggtgcccacccgctaccgccagctggagtataacgcccgcaacgcctacaccgagaagtcctccactggctgcttcagcaacaagagcgacaagatgatgaacaacaactatgactgccccctgcctgaggaagagaccaaccccaagggcagcggctggttgtaccattcagatgccatccgcacctacctgaacctcatgggcaagagcaagaaagatgctaccctggaggcctgtgctggtgccctgcagaacctgacagccagcaaggggctgatgtccagtggcatgagccagttgattgggctgaaggaaaagggcctgccacaaattgcccgcctcctgcaatctggcaactctgatgtggtgcggtccggagcctccctcctgagcaacatgtcccgccaccctctgctgcacagagtgatggggaaccaggtgttcccggaggtgaccaggctcctcaccagccacactggcaataccagcaactccgaagacatcttgtcctcggcctgctacactgtgaggaacctgatggcctcgcagccacaactggccaagcagtacttctccagcagcatgctcaacaacatcatcaacctgtgccgaagcagtgcctcacccaaggccgcagaagctgcccggcttctcctgtctgacatgtggtccagcaaggaactgcagggtgtcctcagacagcaaggtttcgataggaacatgctgggaaccttagctggggccaacagcctcaggaacttcacctcccgattc

SEQ ID NO: 18 - protein, 726 aa, Homo sapiens
MNHSPLKTALAYECFQDQDNSTLALPSDQKMKTGTSGRQRVQEQVMMTVKRQKSKSSQSSTLSHSNRGSMYDGLADNYNYGTTSRSSYYSKFQAGNGSWGYPIYNGTLKREPDNRRFSSYSQMENWSRHYPRGSCNTTGAGSDICFMQKIKASRSEPDLYCDPRGTLRKGTLGSKGQKTTQNRYSFYSTCSGQKAIKKCPVRPPSCASKQDPVYIPPISCNKDLSFGHSRASSKICSEDIECSGLTIPKAVQYLSSQDEKYQAIGAYYIQHTCFQDESAKQQVYQLGGICKLVDLLRSPNQNVQQAAAGALRNLVFRSTTNKLETRRQNGIREAVSLLRRTGNAEIQKQLTGLLWNLSSTDELKEELIADALPVLADRVIIPFSGWCDGNSNMSREVVDPEVFFNATGCLRNLSSADAGRQTMRNYSGLIDSLMAYVQNCVAASRCDDKSVENCMCVLHNLSYRLDAEVPTRYRQLEYNARNAYTEKSSTGCFSNKSDKMMNNNYDCPLPEEETNPKGSGWLYHSDAIRTYLNLMGKSKKDATLEACAGALQNLTASKGLMSSGMSQLIGLKEKGLPQIARLLQSGNSDVVRSGASLLSNMSRHPLLHRVMGNQVFPEVTRLLTSHTGNTSNSEDILSSACYTVRNLMASQPQLAKQYFSSSMLNNIINLCRSSASPKAAEAARLLLSDMWSSKELQGVLRQQGFDRNMLGTLAGANSLRNFTSRF

SEQ ID NO: 19 - DNA, 2241 bp, Homo sapiens
  CDS (1)..(2241)
atgaaccactcgccgctcaagaccgccttggcgtacgaatgcttccaggaccaggacaactccacgttggctttgccgtcggaccaaaagatgaaaacaggcacgtctggcaggcagcgcgtgcaggagcaggtgatgatgaccgtcaagcggcagaagtccaagtcttcccagtcgtccaccctgagccactccaatcgaggttccatgtatgatggcttggctgacaattacaactatgggaccaccagcaggagcagctactactccaagttccaggcagggaatggctcatggggatatccgatctacaatggaaccctcaagcgggagcctgacaacaggcgcttcagctcctacagccagatggagaactggagccggcactacccccggggcagctgtaacaccaccggcgcaggcagcgacatctgcttcatgcagaaaatcaaggcgagccgcagtgagcccgacctctactgtgacccacggggcaccctgcgcaagggcacgctgggcagcaagggccagaagaccacccagaaccgctacagcttttacagcacctgcagtggtcagaaggccataaagaagtgccctgtgcgcccgccctcttgtgcctccaagcaggaccctgtgtatatcccgcccatctcctgcaacaaggacctgtcctttggccactctagggccagctccaagatctgcagtgaggacatcgagtgcagtgggctgaccatccccaaggctgtgcagtacctgagctcccaggatgagaagtaccaggccattggggcctattacatccagcatacctgcttccaggatgaatctgccaagcaacaggtctatcagctgggaggcatctgcaagctggtggacctcctccgcagccccaaccagaacgtccagcaggccgcggcaggggccctgcgcaacctggtgttcaggagcaccaccaacaagctggagacccggaggcagaatgggatccgcgaggcagtcagcctcctgaggagaaccgggaacgccgagatccagaagcagctgactgggctgctctggaacctgtcttccactgacgagctgaaggaggaactcattgccgacgccctgcctgttctggccgaccgcgtcatcattcccttctctggctggtgcgatggcaatagcaacatgtcccgggaagtggtggaccctgaggtcttcttcaatgccacaggctgcttgagaaagagactgggcatgcgggagcttctggctcttgttccgcaaagggccactagtagcagggtgaacctgagctcggccgatgcaggccgccagaccatgcgtaactactcagggctcattgattccctcatggcctatgtccagaactgtgtagcggccagccgctgtgacgacaagtctgtggaaaactgcatgtgtgttctgcacaacctctcctaccgcctggacgccgaggtgcccacccgctaccgccagctggagtataacgcccgcaacgcctacaccgagaagtcctccactggctgcttcagcaacaagagcgacaagatgatgaacaacaactatgactgccccctgcctgaggaagagaccaaccccaagggcagcggctggttgtaccattcagatgccatccgcacctacctgaacctcatgggcaagagcaagaaagatgctaccctggaggcctgtgctggtgccctgcagaacctgacagccagcaaggggctgatgtccagtggcatgagccagttgattgggctgaaggaaaagggcctgccacaaattgcccgcctcctgcaatctggcaactctgatgtggtgcggtccggagcctccctcctgagcaacatgtcccgccaccctctgctgcacagagtgatggggaaccaggtgttcccggaggtgaccaggctcctcaccagccacactggcaataccagcaactccgaagacatcttgtcctcggcctgctacactgtgaggaacctgatggcctcgcagccacaactggccaagcagtacttctccagcagcatgctcaacaacatcatcaacctgtgccgaagcagtgcctcacccaaggccgcagaagctgcccggcttctcctgtctgacatgtggtccagcaaggaactgcagggtgtcctcagacagcaaggtttcgataggaacatgctgggaaccttagctggggccaacagcctcaggaacttcacctcccgattc

SEQ ID NO: 20 - protein, 747 aa, Homo sapiens
MNHSPLKTALAYECFQDQDNSTLALPSDQKMKTGTSGRQRVQEQVMMTVKRQKSKSSQSSTLSHSNRGSMYDGLADNYNYGTTSRSSYYSKFQAGNGSWGYPIYNGTLKREPDNRRFSSYSQMENWSRHYPRGSCNTTGAGSDICFMQKIKASRSEPDLYCDPRGTLRKGTLGSKGQKTTQNRYSFYSTCSGQKAIKKCPVRPPSCASKQDPVYIPPISCNKDLSFGHSRASSKICSEDIECSGLTIPKAVQYLSSQDEKYQAIGAYYIQHTCFQDESAKQQVYQLGGICKLVDLLRSPNQNVQQAAAGALRNLVFRSTTNKLETRRQNGIREAVSLLRRTGNAEIQKQLTGLLWNLSSTDELKEELIADALPVLADRVIIPFSGWCDGNSNMSREVVDPEVFFNATGCLRKRLGMRELLALVPQRATSSRVNLSSADAGRQTMRNYSGLIDSLMAYVQNCVAASRCDDKSVENCMCVLHNLSYRLDAEVPTRYRQLEYNARNAYTEKSSTGCFSNKSDKMMNNNYDCPLPEEETNPKGSGWLYHSDAIRTYLNLMGKSKKDATLEACAGALQNLTASKGLMSSGMSQLIGLKEKGLPQIARLLQSGNSDVVRSGASLLSNMSRHPLLHRVMGNQVFPEVTRLLTSHTGNTSNSEDILSSACYTVRNLMASQPQLAKQYFSSSMLNNIINLCRSSASPKAAEAARLLLSDMWSSKELQGVLRQQGFDRNMLGTLAGANSLRNFTSRF

SEQ ID NO: 21 - DNA, 2385 bp, Mus musculus
  CDS (1)..(2385)
atggccgtccccggctcactggccgagtgtggctacatccggactgtgctgggccagcagatcctgggtcacctggacagctccagcctggccttgccctccgaggccagactgaggctggccggcagcagcggccgcggcgacccggcggcccggagccagcggatccaggagcaggtgcagcagaccctggcccgccggggccggagctctgcggtcagcgggaaccttcaccgaaccagcagtgtccctgagtatgtctacaagctacacgtggttgagaatgactttgttggacggcagtcacctgtcactagggactatgacatgcttaaggctggaatgactgccacttatggaagtcgctgggggagagcagcagcacagtacagttcccagaagtcagtggaggagagatcctggaggcagcctctgaggagacttgagatttccccagatagcagcccggagagagcccactatgggcacagcgaataccagtatgcctggcggagccacgtggtgcctggtgggcgcctcaccctgccacgctatgctcgctcagagatcctgggcctacgccaggctggcacagcccgcaggccacctgggtgcgggtcattcagcgatgctgtcttcgacaatggcccactcaagcccacaatgcccacccaccctcctggcaccagccacagtgcgggcagcttgttggaagagaccactgtgcgcgtgagccaggctcggcttcaaagcacgcagagcagaaccgcccgctcctcctggcccaggagctcagtccgcagtagcctgcgggagccaggaagaatgctgaccaccgcaggccaggctgccgtgggcagcggggatgcacatggggacaggagtgtcttcgctgacgcccagctggggaatgcagacatcgaaatgaccttggagagagctgtgaatatgctggatgcagaccatgtaccagtatccaagatctctgccgcagctaccttcatacagcatgagagcttccaaaaatctgaagcacggaaaagggtcaatcaacttcgaggcatccctaagcttctacaactgctcaaacttcagaacgaagatgttcaacgggctgcttgtggggccttgagaaacttggtatttgaagacaatgataacaagttggaggtagctgaactgaatggagtgcctcggctactgcaggtgctgaagcaaaccagagacttggagacaaaaaagcaaataacaggtttgctctggaacctgtcctctagtgataaactcaagcatctcatgataacagaagccttgctcaccttgacagagagtgtcatcatccccttctccgggtggcctgaaggcgactaccccaaagccaatggcttgcttgattttgatatattctacaatgtcactggatgcctaaggaacatgagctctgctggccccgatgggaggaagatgatgagaaggtgtgatggtctcattgactcattggtccactatgtcagaggaactattgcagactaccagccagatgataaggccacagagaactgtgtgtgcattcttcataacctctcctaccagctggaggcagagctcccagagaaatattcccagagtatctacatgcaaaaccggaatatccagactaacagtaacaaaagtattgggtgttttggcagccgaagtaggaaactaaaagagcaataccaagacttgcagatgccagaggaaaggagcaatccacatggcattgagtggctgtggcattccattgtgataaggatgtatttgtccttaattgccaagagtacccgaaactatacccaagaggcatcacttggggctctccagaacctcacagcaggaggcggcccgatacccacattggtggctcgaatggttgtccaaaaggaaaatggtcttcagcatacacggaagatgctgcacgtgggtgatcccagtgtgaaaaagactgcggtctccctgctgaggaatttgtcacggaatctttccctgcagaatgaaattgctaaagaaactctaccagatttggtttctataattcctgacacagtcccaagtactgaccttctcattgaaaccacagcctctgcttgctatacgttgaacaatttaatgcaaaatagttaccagaatgcacgagaccttctgaacaccggaggtctgcagaaaattatgaccatcagcataggggaaggctatgcccccaacaaggccagcaaagcagcctctgtcctcctttactctctgtgggcacatacagagctgcatcacgcctataagaaggctcagtttaagaaaacagactttgtcaacagccggactgccaaagcctaccactctcttaaagac

SEQ ID NO: 22 - protein, 795 aa, Mus musculus
MAVPGSLAECGYIRTVLGQQILGHLDSSSLALPSEARLRLAGSSGRGDPAARSQRIQEQVQQTLARRGRSSAVSGNLHRTSSVPEYVYKLHVVENDFVGRQSPVTRDYDMLKAGMTATYGSRWGRAAAQYSSQKSVEERSWRQPLRRLEISPDSSPERAHYGHSEYQYAWRSHVVPGGRLTLPRYARSEILGLRQAGTARRPPGCGSFSDAVFDNGPLKPTMPTHPPGTSHSAGSLLEETTVRVSQARLQSTQSRTARSSWPRSSVRSSLREPGRMLTTAGQAAVGSGDAHGDRSVFADAQLGNADIEMTLERAVNMLDADHVPVSKISAAATFIQHESFQKSEARKRVNQLRGIPKLLQLLKLQNEDVQRAACGALRNLVFEDNDNKLEVAELNGVPRLLQVLKQTRDLETKKQITGLLWNLSSSDKLKHLMITEALLTLTESVIIPFSGWPEGDYPKANGLLDFDIFYNVTGCLRNMSSAGPDGRKMMRRCDGLIDSLVHYVRGTIADYQPDDKATENCVCILHNLSYQLEAELPEKYSQSIYMQNRNIQTNSNKSIGCFGSRSRKLKEQYQDLQMPEERSNPHGIEWLWHSIVIRMYLSLIAKSTRNYTQEASLGALQNLTAGGGPIPTLVARMVVQKENGLQHTRKMLHVGDPSVKKTAVSLLRNLSRNLSLQNEIAKETLPDLVSIIPDTVPSTDLLIETTASACYTLNNLMQNSYQNARDLLNTGGLQKIMTISIGEGYAPNKASKAASVLLYSLWAHTELHHAYKKAQFKKTDFVNSRTAKAYHSLKD

SEQ ID NO: 23 - DNA, 2184 bp, Mus musculus
  CDS (1)..(2184)
atgaaccactctccgctcaagaccgcgctggcgtacgaatgcttccaggaccaggacaactccacgctggctttgccctctgaccaaaagatgaagaccggcacgtcgggcaggcagcgcgtgcaggagcaagtgatgatgaccgtcaaacggcagaagtccaagtcttcccagtcgtccaccttgagtcactccaaccgaggttccatgtatgatgggctggctgacaattacaacaactacggcaccacgagcagaagcagctacttctccaagttccaggcagggaatggctcgtggggatatccgatctacaatgggaccctcaagcgggagcccgacaacagacgcttcagctcctatagccagatggagaactggagccggcactatccccgaggcagctgtgccaccccgggcgctggcagtgacatctgcttcatgcagaaaatcaaggcaagccgcagtgagcctgacctctactgtgacccaaggggcacactgcgcaagggcaccctgggcagcaagggccacaagaccacccagaaccgatgcagcttctacagcacttgcagtggtcagaaggctgtcaagaagtgtcccgtgcggccgccctcctgcacctccaagcaagacccggtgtatgtgccgcctatctcctgcaacaaggacctgtccttcggccactcgagggccagttccaagatctgcagtgaggacattgagtgtagtgggctgaccatccccaaggctgtgcagtacctgtgctcccaggatgagaagtaccaggccatcggagcctattacatccagcacacctgcttccaggatgaatctgccaagcaacaggtctatcagctggggggcatctgcaagctggtggacctcctccgcagccccaatcagaatgtccagcaggctgctgccggggccctgcgcaacctggtgttcaggagcacccccaacaagctggagaccaggaggcagaacggaatccgtgaagctgtcagcctcctgaggagaagcgggagcacggagatccaaaaacagctgactgggctcctctggaacctgtcttccactgatgagctgaaggaggagctggtggccgacgccctgcctgttctgactgaccgggtcatcattcctttctctggctggtgtgatggtaacagcaacatgtcccgggaagtagtggaccctgaggtcttcttcaatgctacaggctgcttgaggaacctgagttcagctgatgctggccgccagactatgcggaactactctgggctcattgactccctcatggcctatgtccagaactgcgtggctgccagccgctgcgatgacaagtctgtggagaactgcatgtgtatcctgcataacctctcctaccgcctggacgccgaggtgcccacccgctaccgccagctggagtacaatacccgcaatgcctacaccgagaagtcctccactggctgcttcagcaacaggggtgacaagatgatgaacaataactatgactgcccacttccggaggaagagaccaaccccaagggcagcagctggctgtaccactcagatgccatccggacctacctgaacctcatgggaaagagcaagaaagatgctaccttggaggcctgtgctggggccctgcaaaacctgacagccagcaaggggctgatgtccaatggtatgagtcagttaattggaataaaggaaaagggcctgccacaaatcgcccgtctcctgcaatctggcaattcggatgtggtgcggtccggagcctctctgctgagcaacatgtctcgccaccctgtgctgcacagagtgatgggaaaccaggtgttcccagaggtaaccagactcctcactagccacaccggcaataccagcaactctgaagatatcttgtcctcagcctgctacactgtgaggaacctgatgacctcacagcctcagatggccaagcagtacttctccaacagcatgctcaacaatgtcttcaacttgtgccgcaacactgcctcctcacctaaggctgcagaggctgcccggctactcctgtctgacatgtgggccagcaaggagctgcagagtgtcctcaggcagcaaggtttcgataggaatatgatgggaaacatagctggggccaacaacctcagaaacttcacctcccggttc

SEQ ID NO: 24 - protein, 728 aa, Mus musculus
MNHSPLKTALAYECFQDQDNSTLALPSDQKMKTGTSGRQRVQEQVMMTVKRQKSKSSQSSTLSHSNRGSMYDGLADNYNNYGTTSRSSYFSKFQAGNGSWGYPIYNGTLKREPDNRRFSSYSQMENWSRHYPRGSCATPGAGSDICFMQKIKASRSEPDLYCDPRGTLRKGTLGSKGHKTTQNRCSFYSTCSGQKAVKKCPVRPPSCTSKQDPVYVPPISCNKDLSFGHSRASSKICSEDIECSGLTIPKAVQYLCSQDEKYQAIGAYYIQHTCFQDESAKQQVYQLGGICKLVDLLRSPNQNVQQAAAGALRNLVFRSTPNKLETRRQNGIREAVSLLRRSGSTEIQKQLTGLLWNLSSTDELKEELVADALPVLTDRVIIPFSGWCDGNSNMSREVVDPEVFFNATGCLRNLSSADAGRQTMRNYSGLIDSLMAYVQNCVAASRCDDKSVENCMCILHNLSYRLDAEVPTRYRQLEYNTRNAYTEKSSTGCFSNRGDKMMNNNYDCPLPEEETNPKGSSWLYHSDAIRTYLNLMGKSKKDATLEACAGALQNLTASKGLMSNGMSQLIGIKEKGLPQIARLLQSGNSDVVRSGASLLSNMSRHPVLHRVMGNQVFPEVTRLLTSHTGNTSNSEDILSSACYTVRNLMTSQPQMAKQYFSNSMLNNVFNLCRNTASSPKAAEAARLLLSDMWASKELQSVLRQQGFDRNMMGNIAGANNLRNFTSRF

SEQ ID NO: 25 - DNA, 753 bp, Bos taurus
  CDS (1)..(753)
ctggagtacaacgcccgcaacgcctacaccgacaagtcctccaccggctgcttcagcaacaagagcgaccgcatgacgaacaacaactatgattgcccgcttcccgaggaagagcccaaccccaagggcagcagctggctgtaccactcggacgccgtccgcacctacctgaacctcatgggcaagagcaagaaggacgccaccctggaggcctgcgcgggcgccctgcagaacctgaccgccagcaaggggctgatgtccagtggcatgagccagctgatcgggctgaaggagaagggcctgccccacatcgcccgcctcctgcaatctggcaactcggacgtggtgcggtccggagcctcgctcctgagcaacatgtcccgccaccccgcgctgcacagggtgatggggacccaagtgttcccagaggtgaccagactcctcaccagtcacactggcaacaccagcaactcggaggacatcctggcctcggcctgctacactgtgaggaacctgatggcctccctgccgggcatggccaagcagcacttctccagcagcatggtcaacaacatcatcaacctgtgccgcagcagcacctcccccaaggctgcggaggccgcccgcctcctcctgtccgacatgtggtccagcagggagctgcaggggctgctcaggcagcaaggtttcgataggagcatgctggggaccttagccggggccaacagcctcaggaacttcacctcccgattc

SEQ ID NO: 26 - protein, 251 aa, Bos taurus
LEYNARNAYTDKSSTGCFSNKSDRMTNNNYDCPLPEEEPNPKGSSWLYHSDAVRTYLNLMGKSKKDATLEACAGALQNLTASKGLMSSGMSQLIGLKEKGLPHIARLLQSGNSDVVRSGASLLSNMSRHPALHRVMGTQVFPEVTRLLTSHTGNTSNSEDILASACYTVRNLMASLPGMAKQHFSSSMVNNIINLCRSSTSPKAAEAARLLLSDMWSSRELQGLLRQQGFDRSMLGTLAGANSLRNFTSRF

SEQ ID NO: 27 - DNA, 2184 bp, Canis familiaris
  CDS (1)..(2184)
atgaacccctcgccgctcaagaccgccctggcctacgagtgcttccccgaccaggacaactccacgctggccctgccgtcggaccagaagatgaagacgggcacgtcgggccgccagcgcgtgcaggagcaggtgatgatgaccgtcaagcggcagaagtccaagtcctcgcagtcgtccaccctgagccactccaaccgaggttccatgtacgatggcctggccgacaattacaacaactatgggaccaccagccggagcagctactactccaagatgcaggcggcgaatggctcatggggatatccgatctacaacgggaccctcaagcgggagaatgacaacaggcgcttcagctcctacagccagatggagaactggggccggcactacccacggggcacctgtaccaccactggcgccggcagcgacatctgcttcatgcagaagatcaaggcgagccgcagcgagccggacctctactgtgaccctcgcggcaccctgcgcaagggcacgctgggcaaccggggccagaagaccacccagaaccgctacagcttctacagcacctgcagcggccagaaggcggtcaagaagtgtcccgtgcgcccgtcctcctgcacctccaagccggaccccgtgtacgtcccacccatctcctgcaacaaggacctgtcctttggccactcgagggccagctccaagatctgcagtgaggatattgagtgcagtgggctgaccatccccaaggctgtgcagtacctgagctcccaggacgagaagtaccaggccatcggggcctattacatccagcacacctgtttccaggacgaatcggccaaacaacaggtgtatcagctgggaggcatctgcaagctggtggacctcctccggagccccaaccagaacgtgcagcaggctgcggctggggccctgcgtaacctggtgttccggagtgtcacgaacaagctggagacccggaggcagagcgggatccgagaggctgtcagcctcctgaggagaaccgggagcactgagatccagaaacaactgaccgggctgctctggaacctgtcgtccactgacgagctgaaggaggagctcatcgccgacgccctgcctgtgctggccgaccgggtcatcatccccttctccggctggtgtgacggcaacagcaacgtgacccgggaaatggtggaccccgaagtcttcttcaatgccaccggctgcttgaggaacctgagctcggccgatgccggccgccagaccatgcggaactacacggggctcattgactccctcatggcctacgtccagaactgcgtggccgccagccgctgtgatgacaagtccgtggagaactgcatgtgcatcctgcacaacctctcctaccgcctggacgcggaggtgcccacgcgctaccgccagctggagtacaacgcgcgcaacgcctacacggagaagtcctccaccggctgcttcagcaacaagagcgataagatgatgaacaacaactacgactgccccctcccggaggaagaggccaaccccaagggcagcagctggctgtaccattcggatgccatccgcacctacctgaacctcatgggcaagagcaagaaagacgccaccttggaggcctgcgccggcgccctgcagaacctgacggccagcaaggggctgatgtccagtggcatgagccagctgatcgggctcaaggagaaaggcctgccccagatcgctcgcctcctgcaatcaggcaactctgatgtggtgcggtctggagcctccctcctgagcaacatgtcccgccaccccgtgctgcacagagcgatggggaaccaggtattccccgaggtgaccaggctcctcaccagtcacactgggaacaccagcaactcggaagacatcctgtcctcggcctgctacacggtgaggaacctgatggcctcccagccgcagatggccaagcagtacttcaccagcagcatggtcaacaacatcatcaacctgtgccgcagcagtgcctcacccaaggctgcggaagctgcccgcctcctcctgtctgacatgtggtccagcaaggaactgcagggtgtcctcagacagcaaggcctggataggaacatgctgggggccttaaccggacccaacagcctcaggaacttcacctcccgattctaa

SEQ ID NO: 28 - protein, 727 aa, Canis familiaris
MNPSPLKTALAYECFPDQDNSTLALPSDQKMKTGTSGRQRVQEQVMMTVKRQKSKSSQSSTLSHSNRGSMYDGLADNYNNYGTTSRSSYYSKMQAANGSWGYPIYNGTLKRENDNRRFSSYSQMENWGRHYPRGTCTTTGAGSDICFMQKIKASRSEPDLYCDPRGTLRKGTLGNRGQKTTQNRYSFYSTCSGQKAVKKCPVRPSSCTSKPDPVYVPPISCNKDLSFGHSRASSKICSEDIECSGLTIPKAVQYLSSQDEKYQAIGAYYIQHTCFQDESAKQQVYQLGGICKLVDLLRSPNQNVQQAAAGALRNLVFRSVTNKLETRRQSGIREAVSLLRRTGSTEIQKQLTGLLWNLSSTDELKEELIADALPVLADRVIIPFSGWCDGNSNVTREMVDPEVFFNATGCLRNLSSADAGRQTMRNYTGLIDSLMAYVQNCVAASRCDDKSVENCMCILHNLSYRLDAEVPTRYRQLEYNARNAYTEKSSTGCFSNKSDKMMNNNYDCPLPEEEANPKGSSWLYHSDAIRTYLNLMGKSKKDATLEACAGALQNLTASKGLMSSGMSQLIGLKEKGLPQIARLLQSGNSDVVRSGASLLSNMSRHPVLHRAMGNQVFPEVTRLLTSHTGNTSNSEDILSSACYTVRNLMASQPQMAKQYFTSSMVNNIINLCRSSASPKAAEAARLLLSDMWSSKELQGVLRQQGLDRNMLGALTGPNSLRNFTSRF

SEQ ID NO: 29 - DNA, 813 bp, Danio rerio
  CDS (1)..(813)
atggcctcttccaacaatacctcacccgaaggaggctctccgccccaccagaaccgcattcgccagtcgttggagaactgcgtttgcattttgcacaacctgacctatcagctggagaccgagatgccgactctcttcaacaaaataaacgctctggccagtcagtctcacaaccgctccagttcctctgacgctggtcctatcatctgcttcaggttacagagccagaaactcaagcagaggggttttgactatcctgtgatggaggataacaaccctgaaggtgtgggctggctcttccactctaaagcgctgcagttttacctcaatctgctgagttccagtgaacgggacgccacactggaggcctgttgtggaaccctgcagaacctcacagccaatgaaggcatagttgttgtgcgtctgactgtatgttgtgtgtgtgttttgctctataaagcacctcagtctctgccgcagctggtgggtttcctgaactctggtctttccaagaaagaatcttctcctgaatatgacagtgcgatggccaccgctctgcgcagcgcaaacactctgattaatgcggatcctgatactggcaagaacctgctgaacaacagcctgatcaacaacctctacaacatgagtctcaatagggatcttcaaaagtccagcaaagcgtcagcacttcttcttcacaatctgtggtcgaataagaatatccaaagctttcttaaaaagaacggcatgaaaaagaagtcctttgtgaatgaagtgacgtcagcagctctgaaatctcatctggttattgac

SEQ ID NO: 30 - protein, 271 aa, Danio rerio
MASSNNTSPEGGSPPHQNRIRQSLENCVCILHNLTYQLETEMPTLFNKINALASQSHNRSSSSDAGPIICFRLQSQKLKQRGFDYPVMEDNNPEGVGWLFHSKALQFYLNLLSSSERDATLEACCGTLQNLTANEGIVVVRLTVCCVCVLLYKAPQSLPQLVGFLNSGLSKKESSPEYDSAMATALRSANTLINADPDTGKNLLNNSLINNLYNMSLNRDLQKSSKASALLLHNLWSNKNIQSFLKKNGMKKKSFVNEVTSAALKSHLVID

SEQ ID NO: 31 - DNA, 2184 bp, Rattus norvegicus
  CDS (1)..(2184)
atgaaccactcgccgctcaagaccgcgctggcctacgaatgcttccaggaccaggacaactccacgctcgctttgccctctgaccagaagatgaagaccggcacgtcgggcaggcagcgtgtgcaggagcaggtgatgatgacggtcaaacggcagaagtccaagtcttcgcagtcgtccaccttgagtcactccaaccgaggttccatgtacgatgggctggttgacaattacaacaactatggcaccacgagcagaagcagctacttctccaagttccaagcagggaatggctcctggggatatccgatctataatgggaccctcaagcgggagcctgacaacagacgcttcagctcctatagccagatggagaactggagccggcactatccccgagggagctgtgccaccacaggcgctggcagtgacatctgcttcatgcagaaaatcaaggcaagccgcagcgagcctgacctctactgtgacccgaggggcacactgcgcaagggcacactgggcggcaagggccaaaagaccacccagaaccgatacagcttttacagcacttgcagcggtcagaaggctgtcaagaagtgtcccgtgaggccgccctcctgcacctccaagcaagacccagtgtgcatgccgcctatctcctgcaacaaggacatgtcctttggccactcaagggccagttccaagatctgcagtgaggacattgagtgtagcgggctgaccatccccaaggctgtgcagtacctgtgctcccaggacgagaagtaccaggccatcggagcctattacatccagcacacctgcttccaggatgaatctgccaagcaacaggtctatcagctggggggcatctgcaagctggtggacctcctccgcagccccaatcagaatgtccagcaggctgctgccggggctctgcgcaatctggtgttcaggagcaccactaacaagctggagaccaggaggcagaatgggatccgtgaggctgtcagcctcctgaggagaagcgggagcacggagatccagaaacagttgactgggctgctctggaacctgtcttccactgacgagctaaaggaggaactggtggccgatgccctgcctgttctgactgaccgggtcatcatccctttctctggctggtgtgatggtaacagcaacatgtcccgggaagtagtggaccccgaggtcttcttcaatgccacaggctgcctgaggaatctgagttcagctgatgctggccgccagactatgcggaactactctgggctcattgactccctcatggcctatgtccagaactgtgtggctgccagccgctgcgatgacaagtctgtggagaactgcatgtgtatcctgcataacctctcataccgcctggacgccgaggtgcccacccgctaccggcagctggagtacaacacccgcaatgcctacaccgagaagtcctccactggctgcttcagcaacaggggtgacaagatgatgaacaacaactatgactgcccactccctgaggaagagaccaaccccaagggcagcagctggctgtaccactcagatgccatccgcacctacctgaacctcatgggcaagagcaagaaagacgctaccttggaggcctgtgccggggccctgcagaacctgaccgccagcaagggcctgatgtcgaatggtatgagtcagttgattggaataaaggaaaagggcttgccacaaatagcccgtctcctgcaatctggcaattcggatgtggtgcggtctggggcctctctgctgagcaacatgtctcgccaccctgtgctgcacagagtgatggggaatcaggtgttcccagaggtaaccagactcctcactagccacaccggcaataccagcaactctgaagatatcctgtcctctgcctgctacactgtgaggaacctgatgacctcgcagcctcagatggccaagcagtacttctccaacagcatgctcaacaatgtcttcaacttgtgccgcaacagtgcctcctcacctaaggctgccgaggctgcccggctactcctgtctgacatgtgggccagcaaggagctgcagagtgtcctcaggcagcaaggtttcgataggaacatgatgggaaacatagctggggccaacaacttcagaaacttcacctcccggttc

SEQ ID NO: 32 - protein, 728 aa, Rattus norvegicus
MNHSPLKTALAYECFQDQDNSTLALPSDQKMKTGTSGRQRVQEQVMMTVKRQKSKSSQSSTLSHSNRGSMYDGLVDNYNNYGTTSRSSYFSKFQAGNGSWGYPIYNGTLKREPDNRRFSSYSQMENWSRHYPRGSCATTGAGSDICFMQKIKASRSEPDLYCDPRGTLRKGTLGGKGQKTTQNRYSFYSTCSGQKAVKKCPVRPPSCTSKQDPVCMPPISCNKDMSFGHSRASSKICSEDIECSGLTIPKAVQYLCSQDEKYQAIGAYYIQHTCFQDESAKQQVYQLGGICKLVDLLRSPNQNVQQAAAGALRNLVFRSTTNKLETRRQNGIREAVSLLRRSGSTEIQKQLTGLLWNLSSTDELKEELVADALPVLTDRVIIPFSGWCDGNSNMSREVVDPEVFFNATGCLRNLSSADAGRQTMRNYSGLIDSLMAYVQNCVAASRCDDKSVENCMCILHNLSYRLDAEVPTRYRQLEYNTRNAYTEKSSTGCFSNRGDKMMNNNYDCPLPEEETNPKGSSWLYHSDAIRTYLNLMGKSKKDATLEACAGALQNLTASKGLMSNGMSQLIGIKEKGLPQIARLLQSGNSDVVRSGASLLSNMSRHPVLHRVMGNQVFPEVTRLLTSHTGNTSNSEDILSSACYTVRNLMTSQPQMAKQYFSNSMLNNVFNLCRNSASSPKAAEAARLLLSDMWASKELQSVLRQQGFDRNMMGNIAGANNFRNFTSRF

SEQ ID NO: 33 - DNA, 450 bp, Pan troglodytes
  CDS (1)..(450)
atgcgtaactactcagggctcattgattccctcatggcctatgtccagaactgtgtagcggccagccgctgtgacgacaagtctgtggaaaactgcatgtgtgttctgcacaacctctcctaccgcctggacgccgaggtgcccacccgctaccgccagctggagtataacgcccgcaacgcctacaccgagaagtcctccaccggctgcttcagcaacaagagcgacaagatgatgaacaacaactatgactgccccctgcctgaggaagagaccaaccccaagggcagcggctggttgtaccattcagatgccatccgcacctacctgaacctcatgggcaagaggcagtgttgctgtctgcgtgtccaccttggaatctggctgaactggctgggaggaccaagactgcggctggggtgggcagggaagggaagccgggggctgctg

SEQ ID NO: 34 - protein, 150 aa, Pan troglodytes
MRNYSGLIDSLMAYVQNCVAASRCDDKSVENCMCVLHNLSYRLDAEVPTRYRQLEYNARNAYTEKSSTGCFSNKSDKMMNNNYDCPLPEEETNPKGSGWLYHSDAIRTYLNLMGKRQCCCLRVHLGIWLNWLGGPRLRLGWAGKGSRGLL

SEQ ID NO: 35 - DNA, 5154 bp, Gallus gallus
  CDS (1)..(5154)
atggtcttccagctggggctggtgttgctggtgcaggtttggctggtgcaggggcagttggacctccatatgggaaggatggtcttccagctggggctggtgttgctggtgcaggtttggctggtgcaggggcagttgggtctccatatgggaaggatggtcttccagctggggctggtgttggtggtgcagggagtaaagaagtcatgggatctgtccatggtcaggatgctctgcttggcagagctcaaggatatacatgacttaacaggaacctggtttaaggatgggttaaagttaacaagcatggacggagtctctttggagaaggaaggtctggtccacaaactcgttattagcaaagtagaagatatccatgctgggaagtataggtttgaagctggagatataaaaactgaagcttcaatttttgttgaagacaagccacagccacctgcaggacccatgaaaattgtagaaagctctgcaaatgatgttaccattcagtggaatcccccaaaggatgatgggggcaaaccagtgcaaaactatattattgagaaacagcaagtaggcaagagcgactgggtggctgtgggagaaacccccaggagctgtactactttcactaccagcaaagtggaacaagacatgagctactacttcagagtgagagctgtgaatgcagagggaaccagcgatgcattggaatcagatgaggtggtgactatcagtaaagatcctcccgagatcattggtgtcagcaaagacaccatcacaatatcctggaaaacacctcggagagctggcagctcccgaatttcgggatacatcgttcagaaacgcaagatgggcagcatgacctgggtgccagtcaacagtgtgcccgtagcagacaagaagctgaaaataactgatctcaagaagggtctgcagtatgagttttgtgtggcagctgtcaatgcttctggcataggagatatgagtgcaccgtcacaatctgtctttgctcgggactccacaacaaaagagggaagtgccgtggaaggctacaacgtggagatgcggtcttctaacaacctcagctggaccaaatgcaacatttttcctatagagacgaccacttacaaagttaaaggcctgcaaaccaaggggacgtacttcctacgtgatggggttcctcttccaagccgtgctaaaataagcacccaagatgatacctcccagctgctgattaaagcagctcagttcactgacagtggcatctatactgttgagctcacgagtgggacagggaaaagagaaacgttcagcttccaagttcaagttacagatatcccacaaccacccggacctattgaactgagagagaatgtgccaaatatagtgacagtaacctgggagccatcaacatctgagaaatgggaaagtaatctcttctacacagtcctgaaacgtgaatcacggaaaggcttgtggcacgtgatcggtgacctgatctacaccaacaaattcacttacaccaaagtgatcccaggcagggattactacttcagggttgtggcaaaaaatcacttgggatccagttgtccatccgacactgtgcagccttggagaattcgaaaaccaaaggctgacattcaagtcagaccacagaggtacaagggggttaatcagaaccagcccccaagattcctcgtccccctgaagcctcacgtggtgaccactggcagtgagtgccgcatgagctgtgcagttggaggccatccacccccaaaagtcacgtggtacaaagatgggaaagacctctccaataatccttcctattttggcacaaacgactttggtgtctgctccctggtgatccttggcgtttccaaggctgatgaaggagactacacagttgaagccaccaatgagtcaggccgtgctttcagcagagcctccctcactattaaagcacagctctctgctggcagcagcagccagcaccgatcctcagccgtggtgtggcacatcgtggcctttgtcctcacccactgcacgaaacgcaaagggtttcacaaccgcgtggagccaagagcatcctcgcgccatcgacgcgctcgctccctgcctaaattgggccctgtcatctctgctccttccccggtgggaacaagctctcccttccccgcagcatttcggagctggggcagctcgctgtgtgcagggggaggtgaggaggagtgcggggatctgcctacagagaatgggagagaggcagcaggagatgggcagcacctcaaccagtctggtggaggctccttgggggcagcaaaagccacaacccgggagcctgagcccatggggatacagctggcagtgggggctgcgagtggagcccaggatgcaggagggaaggaaaacagcgcagtgccgcgtgtggaaggagcgccttccgatcccccgggagggaaggaccttccacgaggggccgagcaacgccgaggctgtgcgcacgaggagggcaggttttcctcggggagaaacctcgggaagtgtcagctgagccacggctcagaaaatgccattatcgtgggagatgcaccgcatccccggctcagctccgtctgtcccccccccctcccccgccgagcaccgccgggcagcagcacgccgaggtgccgcggtggcacagcagagccgccatcagccacggcggggacggctgcgctcccccggcggatttcgcagccgtctgcagacaccttcagctcaggagcgcctgacaagtttgaacagaaagccccgcaccgctccgggagcagcattgggccagcgagccctttgattgcgatcaggcagctggcaggaatcccagagctgggggtgagggcagcagagctgcctgccctgcagggccgcgagcggcggcggcggggagcgccgttggcatatgagtgcttccaagaccaggccagctccacgctggccctgccctcggatcacaagctgaaaaccaagggcacgggaaagcagcgggtccaggagcaggtgatgatgacggtgaagcggcagaagcagaagtcgtcggtgtcgtcgagcgtggggcactccaaccgaggttccatgtacgactgtgtagctgatggttatggctacgggacgtcccggggcagttattacaccaaaacccaaatgggaaacagcagctggggatatccgctgtacaacgggaccctgaagcgggatgcggagaaccggcgctacagctcctacagccagatggagggctggggcagcaagcactacagcaaggcagtctgcagccccaacagggccggcagtgactactgctttgtgcagaacatcaagagcagccggagcgagcccgacctctactgcgaaccaccgcggggcacactgaggaagagtcaggttgggggtcgggcagagcacaaggcgaccttgaaccgccagagcatctacagcagctgcagcacccagcagggaactaccaggacaagtaaaaaaataccagcacgggccctctcctgcccctccagcaacaagcccgatgtggtctatgcccagcccgtgatgagctgcaagcaggatgcggtttatggacaggctcagtctggctccaagttagagaaggaggtctgcatcttcaggggctgctgcatcactgtccggcagctctacgcaggacttatcccacctcccataatatgtggtgacgagatagatggtggcacgatgaccatccagaaagccatacagctcctgtgctcctctgatgacaaataccaggccatgggggcttattacctccagcacacctgcttccaggatgagtctgccaagcaagaggtctatcggctgggggggattgccaagctcgttgagctgctccgcagcacaaaccagaacgtacagcgggcggcagccggagccctccggaatttggtcttcaggaatccaaccaacaagatagaaacccggcggcagaacgggataagggagtgtgtgagcctcctgaggaggacggggaacaccgaaattcagaagcagctgacaggtctgctctggaacctctcctccactgatgaattaaaggaggagttgatacaggaggccctccccgtcttgacagactgcgttatcatccctttctctggctggtctgatggtggctgcaacaggacaagggaaatcatcgaccccgaagtattcttcaatgctacagggtgcttgagaaacctcagttctgcagacatgggacgtcagaccatgcgaaactaccctggcttgatcgattccgtcatgacctatgcccagaactgcgtggcttctaaccgacctgatgacaagtctgtggagaactgcatctgcatcctgcacaacctctcctaccgcctggatgctgaggttcccaacaaatacacccaactcaaccacatggcccggagcgtttacatggacaaaactctcacaggctgcttcaacagcaggagtggcaaaatggagaatgatgagtatggcgtccctctccctgaggaggattttaagcccaagggacccagctggctgtaccactcggatgccatccgcacctacctgtccctgatggatcacagcaagaaggatgccaccctggaggcttgtgctggggccctgcagaacctcactgcgagccgagggctgatgtccaatgccatgagccaactgattggggtgaaggaaaaaggtttgcctcgcattgcacggctcctgcagtccaacagctccgaagttgtccggtccggtgcttctttgctgagcaacatgtcccgacatcctatcctgcacaaaaccatggctcaccaggtgctcccagatgtatcacgtctcctgtcattccagtctggaaataccaacagctatggcgagatcatgacatcagcttgttacactctgaggaacctcatcatgtccaacccacacctggggaagtgttacttgacaagcaacatgctcaataatgtagtgagcctgtgccgaaatggctcctgtccaaaagcagccgaagctgctcgcctcctcctgacagacctttggtcgaacagggagctccagagtgtgctcaagcaggagctggtgaagctgtgcacgggtgctgccgactga

SEQ ID NO: 36 - protein, 1717 aa, Gallus gallus
MVFQLGLVLLVQVWLVQGQLDLHMGRMVFQLGLVLLVQVWLVQGQLGLHMGRMVFQLGLVLVVQGVKKSWDLSMVRMLCLAELKDIHDLTGTWFKDGLKLTSMDGVSLEKEGLVHKLVISKVEDIHAGKYRFEAGDIKTEASIFVEDKPQPPAGPMKIVESSANDVTIQWNPPKDDGGKPVQNYIIEKQQVGKSDWVAVGETPRSCTTFTTSKVEQDMSYYFRVRAVNAEGTSDALESDEVVTISKDPPEIIGVSKDTITISWKTPRRAGSSRISGYIVQKRKMGSMTWVPVNSVPVADKKLKITDLKKGLQYEFCVAAVNASGIGDMSAPSQSVFARDSTTKEGSAVEGYNVEMRSSNNLSWTKCNIFPIETTTYKVKGLQTKGTYFLRDGVPLPSRAKISTQDDTSQLLIKAAQFTDSGIYTVELTSGTGKRETFSFQVQVTDIPQPPGPIELRENVPNIVTVTWEPSTSEKWESNLFYTVLKRESRKGLWHVIGDLIYTNKFTYTKVIPGRDYYFRVVAKNHLGSSCPSDTVQPWRIRKPKADIQVRPQRYKGVNQNQPPRFLVPLKPHVVTTGSECRMSCAVGGHPPPKVTWYKDGKDLSNNPSYFGTNDFGVCSLVILGVSKADEGDYTVEATNESGRAFSRASLTIKAQLSAGSSSQHRSSAVVWHIVAFVLTHCTKRKGFHNRVEPRASSRHRRARSLPKLGPVISAPSPVGTSSPFPAAFRSWGSSLCAGGGEEECGDLPTENGREAAGDGQHLNQSGGGSLGAAKATTREPEPMGIQLAVGAASGAQDAGGKENSAVPRVEGAPSDPPGGKDLPRGAEQRRGCAHEEGRFSSGRNLGKCQLSHGSENAIIVGDAPHPRLSSVCPPPLPRRAPPGSSTPRCRGGTAEPPSATAGTAALPRRISQPSADTFSSGAPDKFEQKAPHRSGSSIGPASPLIAIRQLAGIPELGVRAAELPALQGRERRRRGAPLAYECFQDQASSTLALPSDHKLKTKGTGKQRVQEQVMMTVKRQKQKSSVSSSVGHSNRGSMYDCVADGYGYGTSRGSYYTKTQMGNSSWGYPLYNGTLKRDAENRRYSSYSQMEGWGSKHYSKAVCSPNRAGSDYCFVQNIKSSRSEPDLYCEPPRGTLRKSQVGGRAEHKATLNRQSIYSSCSTQQGTTRTSKKIPARALSCPSSNKPDVVYAQPVMSCKQDAVYGQAQSGSKLEKEVCIFRGCCITVRQLYAGLIPPPIICGDEIDGGTMTIQKAIQLLCSSDDKYQAMGAYYLQHTCFQDESAKQEVYRLGGIAKLVELLRSTNQNVQRAAAGALRNLVFRNPTNKIETRRQNGIRECVSLLRRTGNTEIQKQLTGLLWNLSSTDELKEELIQEALPVLTDCVIIPFSGWSDGGCNRTREIIDPEVFFNATGCLRNLSSADMGRQTMRNYPGLIDSVMTYAQNCVASNRPDDKSVENCICILHNLSYRLDAEVPNKYTQLNHMARSVYMDKTLTGCFNSRSGKMENDEYGVPLPEEDFKPKGPSWLYHSDAIRTYLSLMDHSKKDATLEACAGALQNLTASRGLMSNAMSQLIGVKEKGLPRIARLLQSNSSEVVRSGASLLSNMSRHPILHKTMAHQVLPDVSRLLSFQSGNTNSYGEIMTSACYTLRNLIMSNPHLGKCYLTSNMLNNVVSLCRNGSCPKAAEAARLLLTDLWSNRELQSVLKQELVKLCTGAAD

SEQ ID NO: 37 - DNA, 3795 bp, Xenopus laevis
  CDS (1)..(3795)
gatgtgacgcggaaagccccagagcccggcgctggctctgttttctggggagagggcggcagggtttgggcaccgcaccatggagaccgggtgaggggcagcacgtctgggagttacactgcgccttgggaacgggaccgtgcagtccctcatgaggcggacggacccgcggggaggcttgagccggcaggtggaatgccagttccggggcagacttccctgatggaggaggcactgcagaagatcacgcaggcagcacccagcaatactggcatggagcctgaaaccactgcaactaacattttggcatctgtaaaagaacaggagctgcagtttgaaaggctcaccagagaacttgaggtggaaagacagatcgttgccaatcagctagaaagatgccgactcggggccgagtcaccgagtatcgccagtgtaagttctactgaaaagtcatttccctggagatcgggagatgtgccagccggaggtccctccaaaccgagattgtcggattccagtcaccctaaccacttcttgataagatcagagccggaaccgatggcagtgtactctcctgagcaaagctctctccatgaaagtgaggggtcgatgggtaactccaggagctcaactcaaatgaattcatactctgacagcggctaccaagaggcaggcagctttcataacaacaacatagggaaggccgaactgcgagcccagctgtcgtttacggggtccacaggcaaccatgttgtacggaattccagggctgaaggccagactttagtccaaccgccaccaccaaatacaatggcaggcagccgagctgtgcggagggtcagctctgtcccatcaaggtcgcagtcaccttcttatgtcattggatctggagtttccccttctagagggtcactgagaacttctgtcggaagtggatatggttctccaacaatttccgatccacggccacttgccacttcaaacacatactcttctactacattgccttctcagagagctgcttctccgtatacatcacacagggccaactcaccgacagtcacactcaggattggttcacttaacagcagacagctggccaatcctaatacaatgacttcatcttaccagacactgggaagttctgcccgagttggttcaccgttgactttatctgatgcacatagtagagttggctcatcttcccaagctcctatgggatcctcttcctctccaaagcgggctggtatgactgcagtcccccagcacatgggaacattacaaagaaacttgcatgatattgaccagtacggacagcaacattatgacatctatgaaaggatggttccatcaagaccagatagccttacaggcttaagaagttcttatgcaagtcaacacagtcaacttggacaggaactgagatcaacagtatcacccgacctgcagatcacgccaatatatgaagggaggacttattatagtccagtctaccgcaacgccaaccatgcggccatagagctcaggcaaggctcacatacagcaatctatcgtacaggatcagggtctggtaacctacagaggaccatgagcaatcgtagcacacttgcataccaaagaaataattatgcgctcaacacagcggctaattatgcagagccatacagatcaatgcagtatcgaatatcagaatccggctacaacaggatgccgcatacagcacccccagacgatggcaccacaaggtctccttccattgacagcatccagaaggacccaagggagtttgcttggcgggacccggagttaccagaagtcatttatatgcttcagcatcactttccttcggtgcaagccaatgccgctgcttacctgcagcacctctgctttggagaccacaaaaccaagatagaggtgtgccggctgggagggatcaaacacttggtagaccttcttgataacaaggtactggaagtccagaagaatgcctgtggagccttgagaaatttagtttatggcaaatctactgatgaaaataagattgccgtgaaaaatgcggggggcgttcctgcccttttaagactactgagaaaaacaaatgaccaagaagtacgggaacttgtcactggagtcctgtggaacttatcttcctgtgatgctgtaaagatgactattatccgtgacgctttatctcccctcactaacactgtgatagtgccacattcgggcttcaataattcttctttcgacgacgatcacaaaatgaaatttcagtcttcatcagtcctgcgcaacactaccggctgcatgagaaacctgagttcggcaggggaagaggcacgcaagcagatgagatactgtgaagggctggtcgattctctgctcttcgtgatccaaacctgtgtgaacacttctgattttgacagcaagaccgtggagaactgtgtctgcacactgagaaacttgtcttatcgtctggaattagaagttcctcaggctcgaatgctgggaataaatgaaatggacggcttctgcaaggaatcccccagcaaagactctgactccagctgttgggggaaaaagaagaaaaagaaaagaaagcccccgcaggaagacttgtgggatggagttggtcctattcctgggctttcccagtcccccaaaggagtggaaatgctgtggcacccatcagtagtcaagccatatctgactcttctagcggaaagctctaaccctgcaacactggagggttctgctgggtctttacagaatctgtctgccgggaactggaagtttgcagcatacatcagagctgcggtaaggaaggagaagggacttcctattctggttgaactcctgagaatggataatgatagggttgtttcttctgttgctacagcattaagaaatatggcattagatgtccgcaacaaagagcttattggtaaatatgctatgcgggacttggcaaaccgactccctggaggtaatgggccaaacattttatctgacgacactgtggctgcaatctgttgtgctttgaacgaggtatcaagcaagaacatggagaatgctaaagctctggctgacacaggaggaattgagaagctggtgaatatcacaaaaggaaagggagacagatcttcactgaaagtggttaaagctgccgcccaagtcctaaacacattatggcaatatcgagaccttcgtagcatttataagaaggacggctggaatcagtctcattttatcactccagtatcaacactagagcgtgagcgtttcaagtctcacccttccttatccaccaccaatcagcagatgtcacccatgatccagtcagtgggcagcacctcctcttcaccagcactgttaggaatacgggaacctcactctggttatgagagaacacaaccctctatgcaatactataacagccagggagaccccatctctaacaaggaaatgtacactgggtccagcaaagcatctccgatctacatcggctcctattcatcaccagcacgagagcagaacaggcggcagcagcatcaccagctgtactatagtcatgaagactcaaataggaaaaactatgatgcataccgattgtatttgcagtctccacacagctacgaagacccatattttgacgagcgtgtccactacacgacgactgcggatcagaatgcgcaatatggactcaaatcgaccacaaactatgtagacttttactccactagaagaccttcctatagatcagaacagtacccagggtcgccggactcgtgggtg

SEQ ID NO: 38 - protein, 1265 aa, Xenopus laevis
DVTRKAPEPGAGSVFWGEGGRVWAPHHGDRVRGSTSGSYTAPWERDRAVPHEADGPAGRLEPAGGMPVPGQTSLMEEALQKITQAAPSNTGMEPETTATNILASVKEQELQFERLTRELEVERQIVANQLERCRLGAESPSIASVSSTEKSFPWRSGDVPAGGPSKPRLSDSSHPNHFLIRSEPEPMAVYSPEQSSLHESEGSMGNSRSSTQMNSYSDSGYQEAGSFHNNNIGKAELRAQLSFTGSTGNHVVRNSRAEGQTLVQPPPPNTMAGSRAVRRVSSVPSRSQSPSYVIGSGVSPSRGSLRTSVGSGYGSPTISDPRPLATSNTYSSTTLPSQRAASPYTSHRANSPTVTLRIGSLNSRQLANPNTMTSSYQTLGSSARVGSPLTLSDAHSRVGSSSQAPMGSSSSPKRAGMTAVPQHMGTLQRNLHDIDQYGQQHYDIYERMVPSRPDSLTGLRSSYASQHSQLGQELRSTVSPDLQITPIYEGRTYYSPVYRNANHAAIELRQGSHTAIYRTGSGSGNLQRTMSNRSTLAYQRNNYALNTAANYAEPYRSMQYRISESGYNRMPHTAPPDDGTTRSPSIDSIQKDPREFAWRDPELPEVIYMLQHHFPSVQANAAAYLQHLCFGDHKTKIEVCRLGGIKHLVDLLDNKVLEVQKNACGALRNLVYGKSTDENKIAVKNAGGVPALLRLLRKTNDQEVRELVTGVLWNLSSCDAVKMTIIRDALSPLTNTVIVPHSGFNNSSFDDDHKMKFQSSSVLRNTTGCMRNLSSAGEEARKQMRYCEGLVDSLLFVIQTCVNTSDFDSKTVENCVCTLRNLSYRLELEVPQARMLGINEMDGFCKESPSKDSDSSCWGKKKKKKRKPPQEDLWDGVGPIPGLSQSPKGVEMLWHPSVVKPYLTLLAESSNPATLEGSAGSLQNLSAGNWKFAAYIRAAVRKEKGLPILVELLRMDNDRVVSSVATALRNMALDVRNKELIGKYAMRDLANRLPGGNGPNILSDDTVAAICCALNEVSSKNMENAKALADTGGIEKLVNITKGKGDRSSLKVVKAAAQVLNTLWQYRDLRSIYKKDGWNQSHFITPVSTLERERFKSHPSLSTTNQQMSPMIQSVGSTSSSPALLGIREPHSGYERTQPSMQYYNSQGDPISNKEMYTGSSKASPIYIGSYSSPAREQNRRQQHHQLYYSHEDSNRKNYDAYRLYLQSPHSYEDPYFDERVHYTTTADQNAQYGLKSTTNYVDFYSTRRPSYRSEQYPGSPDSWV

SEQ ID NO: 39 - DNA, 6816 bp, Homo sapiens
  CDS (1)..(6816)
atgagctgcaacggaggctcccacccgcggatcaacactctgggccgcatgatccgcgccgagtctggcccggacctgcgctacgaggtgaccagcggcggcgggggcaccagcaggatgtactattctcggcgcggcgtgatcaccgaccagaactcggacggctactgtcaaaccggcacgatgtccaggcaccagaaccagaacaccatccaggagctgctgcagaactgctccgactgcttgatgcgagcagagctcatcgtgcagcctgaattgaagtatggagatggaatacaactgactcggagtcgagaattggatgagtgttttgcccaggccaatgaccaaatggaaatcctcgacagcttgatcagagagatgcggcagatgggccagccctgtgatgcttaccagaaaaggcttcttcagctccaagagcaaatgcgagccctttataaagccatcagtgtccctcgagtccgcagggccagctccaagggtggtggaggctacacttgtcagagtggctctggctgggatgagttcaccaaacatgtcaccagtgaatgtttggggtggatgaggcagcaaagggcggagatggacatggtggcctggggtgtggacctggcctcagtggagcagcacattaacagccaccggggcatccacaactccatcggcgactatcgctggcagctggacaaaatcaaagccgacctgcgcgagaaatctgcgatctaccagttggaggaggagtatgaaaacctgctgaaagcgtcctttgagaggatggatcacctgcgacagctgcagaacatcattcaggccacgtccagggagatcatgtggatcaatgactgcgaggaggaggagctgctgtacgactggagcgacaagaacaccaacatcgctcagaaacaggaggccttctccatacgcatgagtcaactggaagttaaagaaaaagagctcaataagctgaaacaagaaagtgaccaacttgtcctcaatcagcatccagcttcagacaaaattgaggcctatatggacactctgcagacgcagtggagttggattcttcagatcaccaagtgcattgatgttcatctgaaagaaaatgctgcctactttcagttttttgaagaggcgcagtctactgaagcatacctgaaggggctccaggactccatcaggaagaagtacccctgcgacaagaacatgcccctgcagcacctgctggaacagatcaaggagctggagaaagaacgagagaaaatccttgaatacaagcgtcaggtgcagaacttggtaaacaagtctaagaagattgtacagctgaagcctcgtaacccagactacagaagcaataaacccattattctcagagctctctgtgactacaaacaagatcagaaaatcgtgcataagggggatgagtgtatcctgaaggacaacaacgagcgcagcaagtggtacgtgacgggcccgggaggcgttgacatgcttgttccctctgtggggctgatcatccctcctccgaacccactggccgtggacctctcttgcaagattgagcagtactacgaagccatcttggctctgtggaaccagctctacatcaacatgaagagcctggtgtcctggcactactgcatgattgacatagagaagatcagggccatgacaatcgccaagctgaaaacaatgcggcaggaagattacatgaagacgatagccgaccttgagttacattaccaagagttcatcagaaatagccaaggctcagagatgtttggagatgatgacaagcggaaaatacagtctcagttcaccgatgcccagaagcattaccagaccctggtcattcagctccctggctatccccagcaccagacagtgaccacaactgaaatcactcatcatggaacctgccaagatgtcaaccataataaagtaattgaaaccaacagagaaaatgacaagcaagaaacatggatgctgatggagctgcagaagattcgcaggcagatagagcactgcgagggcaggatgactctcaaaaacctccctctagcagaccaggggtcttctcaccacatcacagtgaaaattaacgagcttaagagtgtgcagaatgattcacaagcaattgctgaggttctcaaccagcttaaagatatgcttgccaacttcagaggttctgaaaagtactgctatttacagaatgaagtatttggactatttcagaaactggaaaatatcaatggtgttacagatggctacttaaatagcttatgcacagtaagggcactgctccaggctattctccaaacagaagacatgttaaaggtttatgaagccaggctcactgaggaggaaactgtctgcctggacctggataaagtggaagcttaccgctgtggactgaagaaaataaaaaatgacttgaacttgaagaagtcgttgttggccactatgaagacagaactacagaaagcccagcagatccactctcagacttcacagcagtatccactttatgatctggacttgggcaagttcggtgaaaaagtcacacagctgacagaccgctggcaaaggatagataaacagatcgactttaggttatgggacctggagaaacaaatcaagcaattgaggaattatcgtgataactatcaggctttctgcaagtggctctatgatgctaaacgccgccaggattccttagaatccatgaaatttggagattccaacacagtcatgcggtttttgaatgagcagaagaacttgcacagtgaaatatctggcaaacgagacaaatcagaggaagtacaaaaaattgctgaactttgcgccaattcaattaaggattatgagctccagctggcctcatacacctcaggactggaaactctgctgaacatacctatcaagaggaccatgattcagtccccttctggggtgattctgcaagaggctgcagatgttcatgctcggtacattgaactacttacaagatctggagactattacaggttcttaagtgagatgctgaagagtttggaagatctgaagctgaaaaataccaagatcgaagttttggaagaggagctcagactggcccgagatgccaactcggaaaactgtaataagaacaaattcctggatcagaacctgcagaaataccaggcagagtgttcccagttcaaagcgaagcttgcgagcctggaggagctgaagagacaggctgagctggatgggaagtcggctaagcaaaatctagacaagtgctacggccaaataaaagaactcaatgagaagatcacccgactgacttatgagattgaagatgaaaagagaagaagaaaatctgtggaagacagatttgaccaacagaagaatgactatgaccaactgcagaaagcaaggcaatgtgaaaaggagaaccttggttggcagaaattagagtctgagaaagccatcaaggagaaggagtacgagattgaaaggttgagggttctactgcaggaagaaggcacccggaagagagaatatgaaaatgagctggcaaaggcatctaataggattcaggaatcaaagaatcagtgtactcaggtggtacaggaaagagagagccttctggtgaaaatcaaagtcctggagcaagacaaggcaaggctgcagaggctggaggatgagctgaatcgtgcaaaatcaactctagaggcagaaaccagggtgaaacagcgcctggagtgtgagaaacagcaaattcagaatgacctgaatcagtggaagactcaatattcccgcaaggaggaggctattaggaagatagaatcggaaagagaaaagagtgagagagagaagaacagtcttaggagtgagatcgaaagactccaagcagagatcaagagaattgaagagaggtgcaggcgtaagctggaggattctaccagggagacacagtcacagttagaaacagaacgctcccgatatcagagggagattgataaactcagacagcgcccatatgggtcccatcgagagacccagactgagtgtgagtggaccgttgacacctccaagctggtgtttgatgggctgaggaagaaggtgacagcaatgcagctctatgagtgtcagctgatcgacaaaacaaccttggacaaactattgaaggggaagaagtcagtggaagaagttgcttctgaaatccagccattccttcggggtgcaggatctatcgctggagcatctgcttctcctaaggaaaaatactctttggtagaggccaagagaaagaaattaatcagcccagaatccacagtcatgcttctggaggcccaggcagctacaggtggtataattgatccccatcggaatgagaagctgactgtcgacagtgccatagctcgggacctcattgacttcgatgaccgtcagcagatatatgcagcagaaaaagctatcactggttttgatgatccattttcaggcaagacagtatctgtttcagaagccatcaagaaaaatttgattgatagagaaaccggaatgcgcctgctggaagcccagattgcttcagggggtgtagtagaccctgtgaacagtgtctttttgccaaaagatgtcgccttggcccgggggctgattgatagagatttgtatcgatccctgaatgatccccgagatagtcagaaaaactttgtggatccagtcaccaaaaagaaggtcagttacgtgcagctgaaggaacggtgcagaatcgaaccacatactggtctgctcttgctttcagtacagaagagaagcatgtccttccaaggaatcagacaacctgtgaccgtcactgagctagtagattctggtatattgagaccgtccactgtcaatgaactggaatctggtcagatttcttatgacgaggttggtgagagaattaaggacttcctccagggttcaagctgcatagcaggcatatacaatgagaccacaaaacagaagcttggcatttatgaggccatgaaaattggcttagtccgacctggtactgctctggagttgctggaagcccaagcagctactggctttatagtggatcctgttagcaacttgaggttaccagtggaggaagcctacaagagaggtctggtgggcattgagttcaaagagaagctcctgtctgcagaacgagctgtcactgggtataatgatcctgaaacaggaaacatcatctctttgttccaagccatgaataaggaactcatcgaaaagggccacggtattcgcttattagaagcacagatcgcaaccggggggatcattgacccaaaggagagccatcgtttaccagttgacatagcatataagaggggctatttcaatgaggaactcagtgagattctctcagatccaagtgatgataccaaaggattttttgaccccaacactgaagaaaatcttacctatctgcaactaaaagaaagatgcattaaggatgaggaaacagggctctgtcttctgcctctgaaagaaaagaagaaacaggtgcagacatcacaaaagaataccctcaggaagcgtagagtggtcatagttgacccagaaaccaataaagaaatgtctgttcaggaggcctacaagaagggcctaattgattatgaaaccttcaaagaactgtgtgagcaggaatgtgaatgggaagaaataaccatcacgggatcagatggctccaccagggtggtcctggtagatagaaagacaggcagtcagtatgatattcaagatgctattgacaagggccttgttgacaggaagttctttgatcagtaccgatccggcagcctcagcctcactcaatttgctgacatgatctccttgaaaaatggtgtcggcaccagcagcagcatgggcagtggtgtcagcgatgatgtttttagcagctcccgacatgaatcagtaagtaagatttccaccatatccagcgtcaggaatttaaccataaggagcagctctttttcagacaccctggaagaatcgagccccattgcagccatctttgacacagaaaacctggagaaaatctccattacagaaggtatagagcggggcatcgttgacagcatcacgggtcagaggcttctggaggctcaggcctgcacaggtggcatcatccacccaaccacgggccagaagctgtcacttcaggacgcagtctcccagggtgtgattgaccaagacatggccaccaggctgaagcctgctcagaaagccttcataggcttcgagggtgtgaagggaaagaagaagatgtcagcagcagaggcagtgaaagaaaaatggctcccgtatgaggctggccagcgcttcctggagttccagtacctcacgggaggtcttgttgacccggaagtgcatgggaggataagcaccgaagaagccatccggaaggggttcatagatggccgcgccgcacagaggctgcaagacaccagcagctatgccaaaatcctgacctgccccaaaaccaaattaaaaatatcctataaggatgccataaatcgctccatggtagaagatatcactgggctgcgccttctggaagccgcctccgtgtcgtccaagggcttacccagcccttacaacatgtcttcggctccggggtcccgctccggctcccgctcgggatctcgctccggatctcgctccgggtcccgcagtgggtcccggagaggaagctttgacgccacagggaattcttcctactcttattcctactcatttagcagtagttctattgggcac

SEQ ID NO: 40 - protein, 2272 aa, Homo sapiens
MSCNGGSHPRINTLGRMIRAESGPDLRYEVTSGGGGTSRMYYSRRGVITDQNSDGYCQTGTMSRHQNQNTIQELLQNCSDCLMRAELIVQPELKYGDGIQLTRSRELDECFAQANDQMEILDSLIREMRQMGQPCDAYQKRLLQLQEQMRALYKAISVPRVRRASSKGGGGYTCQSGSGWDEFTKHVTSECLGWMRQQRAEMDMVAWGVDLASVEQHINSHRGIHNSIGDYRWQLDKIKADLREKSAIYQLEEEYENLLKASFERMDHLRQLQNIIQATSREIMWINDCEEEELLYDWSDKNTNIAQKQEAFSIRMSQLEVKEKELNKLKQESDQLVLNQHPASDKIEAYMDTLQTQWSWILQITKCIDVHLKENAAYFQFFEEAQSTEAYLKGLQDSIRKKYPCDKNMPLQHLLEQIKELEKEREKILEYKRQVQNLVNKSKKIVQLKPRNPDYRSNKPIILRALCDYKQDQKIVHKGDECILKDNNERSKWYVTGPGGVDMLVPSVGLIIPPPNPLAVDLSCKIEQYYEAILALWNQLYINMKSLVSWHYCMIDIEKIRAMTIAKLKTMRQEDYMKTIADLELHYQEFIRNSQGSEMFGDDDKRKIQSQFTDAQKHYQTLVIQLPGYPQHQTVTTTEITHHGTCQDVNHNKVIETNRENDKQETWMLMELQKIRRQIEHCEGRMTLKNLPLADQGSSHHITVKINELKSVQNDSQAIAEVLNQLKDMLANFRGSEKYCYLQNEVFGLFQKLENINGVTDGYLNSLCTVRALLQAILQTEDMLKVYEARLTEEETVCLDLDKVEAYRCGLKKIKNDLNLKKSLLATMKTELQKAQQIHSQTSQQYPLYDLDLGKFGEKVTQLTDRWQRIDKQIDFRLWDLEKQIKQLRNYRDNYQAFCKWLYDAKRRQDSLESMKFGDSNTVMRFLNEQKNLHSEISGKRDKSEEVQKIAELCANSIKDYELQLASYTSGLETLLNIPIKRTMIQSPSGVILQEAADVHARYIELLTRSGDYYRFLSEMLKSLEDLKLKNTKIEVLEEELRLARDANSENCNKNKFLDQNLQKYQAECSQFKAKLASLEELKRQAELDGKSAKQNLDKCYGQIKELNEKITRLTYEIEDEKRRRKSVEDRFDQQKNDYDQLQKARQCEKENLGWQKLESEKAIKEKEYEIERLRVLLQEEGTRKREYENELAKASNRIQESKNQCTQVVQERESLLVKIKVLEQDKARLQRLEDELNRAKSTLEAETRVKQRLECEKQQIQNDLNQWKTQYSRKEEAIRKIESEREKSEREKNSLRSEIERLQAEIKRIEERCRRKLEDSTRETQSQLETERSRYQREIDKLRQRPYGSHRETQTECEWTVDTSKLVFDGLRKKVTAMQLYECQLIDKTTLDKLLKGKKSVEEVASEIQPFLRGAGSIAGASASPKEKYSLVEAKRKKLISPESTVMLLEAQAATGGIIDPHRNEKLTVDSAIARDLIDFDDRQQIYAAEKAITGFDDPFSGKTVSVSEAIKKNLIDRETGMRLLEAQIASGGVVDPVNSVFLPKDVALARGLIDRDLYRSLNDPRDSQKNFVDPVTKKKVSYVQLKERCRIEPHTGLLLLSVQKRSMSFQGIRQPVTVTELVDSGILRPSTVNELESGQISYDEVGERIKDFLQGSSCIAGIYNETTKQKLGIYEAMKIGLVRPGTALELLEAQAATGFIVDPVSNLRLPVEEAYKRGLVGIEFKEKLLSAERAVTGYNDPETGNIISLFQAMNKELIEKGHGIRLLEAQIATGGIIDPKESHRLPVDIAYKRGYFNEELSEILSDPSDDTKGFFDPNTEENLTYLQLKERCIKDEETGLCLLPLKEKKKQVQTSQKNTLRKRRVVIVDPETNKEMSVQEAYKKGLIDYETFKELCEQECEWEEITITGSDGSTRVVLVDRKTGSQYDIQDAIDKGLVDRKFFDQYRSGSLSLTQFADMISLKNGVGTSSSMGSGVSDDVFSSSRHESVSKISTISSVRNLTIRSSSFSDTLEESSPIAAIFDTENLEKISITEGIERGIVDSITGQRLLEAQACTGGIIHPTTGQKLSLQDAVSQGVIDQDMATRLKPAQKAFIGFEGVKGKKKMSAAEAVKEKWLPYEAGQRFLEFQYLTGGLVDPEVHGRISTEEAIRKGFIDGRAAQRLQDTSSYAKILTCPKTKLKISYKDAINRSMVEDITGLRLLEAASVSSKGLPSPYNMSSAPGSRSGSRSGSRSGSRSGSRSGSRRGSFDATGNSSYSYSYSFSSSSIGH

SEQ ID NO: 41 - DNA, 8850 bp, Mus musculus
  CDS (1)..(8850)
atgagctgcaacggcggctcccacccgcggatcaacacgctgggtcgcatgacccgcgcggagtccggcccggacctgcgctacgagatgacctacagcgctctggctgagagggtgaccctggagaaagcactgtggcgcccaggattaggagctgccgaggaacccacggcacaaagggctgggtcctcttcccgggatagtcgggtaaatacagcgagggagtcactggtgggtgggagaagtcaaaccggcaccatgtctagacatcagaatcagaacaccatccaagaaatgctgcaaaattgctcagactgtctgatgcgggcggagctgatcgcgcagccggaactgaaattcggagaagggatgcagctggcatggaaccgagagctggatgagtattttacacaagccaacgatcagatggaaatcatagacggcttgatccgagagatgaggcagatgggccagccctgtgatgcgtatcagaaaaggcagcagcagcagcagaggcctctggtagagcttctgccttttcaagaggccaatgtcaagctttatttaatcaaactgcttcagctccaggaacaaatgcgagccctttacaaggccatcagcgtccctcgggtccgaagagccagctccaagggagccggagggtacacttgccagagtggatccggctgggacgagttcaccaaacgcctcacgggcgagtgtctgggctggatgaggcagcagagggaggaaatggacctgatggcctggggtgtggacgctggttcagtggaacagcacatcaatagccacaggagcatccacaacaccattggggactaccgctggcagctggacaagatcaaagcagacctgtgtctgctcagctctctccttcatggttctaagatccagaggatccgaaatcgtatttccttcagcaaggttttaagtgacagacgtgagaagtcagcaatctaccagttggaggaggaatatgaaaacctgctgaaagcctccttcgagaggatggaccacctgcgccagctgcagaacatcatccaggccacctctcgagagatcatgtggatcaatgactgcgaggaggaggagctgctctatgactggagcgacaagaacaccaacatcgctcagaagcaggaggccttctctatacgcatgagtcaactggaggtcaaggaaaaggaactcaataagcttaaacaagaaagtgaccagcttgtcctcaatcagcatccagcttcagacaaaattgaggcatacatggacactcttcagacgcagtggagctggattctgcagatcaccaagtgcattgatgtccatctcaaagaaaacgctgcttacttccagttttttgaagaggctcagtcaactgaagcctacctgaagggcctgcaggactccatcaggaagaaatacccctgtgacaagaatatgcctctccagcacctgctggagcagatcaaagagctggagaaagaacgggagaagatcattgaatacaagcgtcaggtgcagaacttggtaaacaagtccaagaagatcgtgcagctgaaacctcggaacccagactacaggagcaacaagcccattatcctcagggctctctgcgactacaaacaagaccagaaaatcgtacacaaaggggatgagtgtattctgaaggacaacaacgagcgcagcaagtggtacgtgacgggcccaggaggcgtggacatgcttgtcccttccgtgggcctgatcatcccgcctccgaacccactggctgtggacctttcttgcaagattgagcagtactatgaagccatcttggctctgtggaaccagctctacatcaacatgaagagcctggtgtcttggcactactgcatgattgacatcgagaagatcagagccatgactattgccaagctgaaaacgatgagacaagaagattacatgaagaccatcgaagaccttgagctccattaccaagacttcatcaagaacagccaaggctcggagatgtttggagacgacgacaagcggcggatgcagtcccagttcaccgatgcccagaagcattaccagaccctggtcattcagcttcctggccacccccagcaccagacagtcaccaaaaccgaaatcactcacctgggtacctgccaagatgtcaaccacaataaagtgatcgaaacgaaccgagaaaacgacaaacaggagacatggttgctgatggagctgcagaagatccgcaggcagatggagcattgtgaggccaggatgacgcttaaaaatctcctgctggcagagcaaggctctacacaccacatcaccgtgaaaatcaacgagctcaagagcgtacagaacgactcccaagccctggccgaggttctcaatcagcttaaagacatgcttgccaacttccgaggctctgaaaagtactgctacctgcagaatgagatatttggactgtttcagaagctggaaaatatcaatggtgtctcggatggctacttaaacagcctgtgttccgtgagagcccttctccaggctattctgcaaacggaagacatgctgaaggtctatgaagcgaggctgacggaagaggaaactgtctgtctggacctggataaagtagaggcttaccgctgcgggctgaagaaaataaaaaatgacttgaacttgaaaaagtcgctgttggccaccatgaagacggagctgcagaaggcacagcagatccactcccagtcctctcagcagtacccgctctatgacctggacctgggcaaattcactgagaaagtgacccagctgacggaccgctggcaaaagatagataaacagatagacttcagattgtgggacctggagaaacaaatcaaacaactgaggaattatcgggacaactatcagagcttctgcaagtggctatatgatgccaaacgccgccaggactctttagagtccatgaagtttggagattccaacacagtcatgcggtttttgaatgagcagaagaacctgcacagtgaaatatctggcaaacgagacaaatcagaagaagtgcataaaatcgctgaactttgcgcaaactcaattaaggattatgaactgcagctggcatcgtacacctcagggctggaaactctactgaacatacctatcaagaggaccatggttcagtccccatccggggtgattctgcaagaggctgcggacattcatgcgagatacattgaactgcttacgaggtctggagactactacagattcctaagtgagatgttgaagagtctggaagatctaaagctgaaaaacaccaagattgaagttttggaagaggagctaagactggcccgggatgccaactcggaaaattgcaataagaataagttcctagatcagaacctgcagaaataccaggcagagtgttcccagttcaaggccaagcttgtgagcctggaggagctcaagagacaagctgagctcgatggaaagtcagccaagcaaaacctagacaagtgctacggtcagatcaaggaactcaacgagaagatcacccggctgacctatgagatcgaagacgagaagcgccggagaaagaccgtggaggacaggttcgaccaacagaagaatgactatgatcagctgcagaaggcaaggcagtgtgagaaggagaacctcagctggcagaagctggagtctgagaaagccatcaaggagaaggagtacgagatagagaggttgagggttctgctgcaggaagagggcgcccggaagagagagtatgaaaatgagctggcaaaggtaagaaaccactataatgaggagatgagtaatttaaggaacaagtatgaaacagagattaacatcaccaagaccaccatcaaggagatatccatgcagaaggaagacgattccaagaatctcagaaaccagatggacagactctcccgggagaaccgagatcttaaggatgagatagtcaggctcaatgacagcatcttgcaggccacggagcagcgaaggagagccgaggagaacgccctgcagcagaaagcctgtggctcggaaaccatgcagaagaagcagcgcctggagattgaactgaagcaggtcatccagcagcgctcagaggacaacgccaggcacaagcagtccctggaggaggctgccaagaccatccaggacaagaacaaagagatcgaaaggctcaaagctgagtatcaggaggaggccaagcggcgctgggaatacgaaaatgaactgagtaaggtaaggaacagttacgatgaggagatcattagcttaaaaaaccagttcgagaccgagatcaacatcaccaagaccacgatccaccagctgaccatgcagaaggaagaggacaccagtggctaccgagcgcagatagacaatctcacccgagaaaacaggagcttgtgtgaggaggtcaagaggctgaagaacactctagcccagaccaccgagaacctcaggagggtcgaagagaacgcccagcagcagaaggccactggctcagagatgtctcagaggaaacagcagttggagatcgagctccgacaggtcactcagatgcgaactgaagagagcatgaggtacaagcagtccctcgatgacgctgccaagaccatccaggataagaacaaggagatcgaaaggctcaaacagctggtcgacaaagaaaccaatgagaggaagtgcctggaggacgaaaattccaagttgcagagagtccagtatgacctgcagaaagccaacaacagcgccacggaggccatgagcaaactgaaggttcaggaacaggagttaacgcgcctacggattgactatgagagggtgtcccaggagaggaccgtgaaggatcaggacatcacgaggatccagagctccctgaaggatctgcagctgcagaagcagaaagcggaagaggagctgagtaggctgaagagaacagcctccgacgagtcctccaagaggaagatgctggaggaggaactggaggccatgaggaggtctttgaaagagcaagccgtcaaaatcaccaacctgacccagcagctggagcaggcgtccattgttaagaagaggagcgaggatgacctcaggcagcagagggatgtgctggatggccacgtgagggagaagcagaggacccaggaggagctgaggaggctctccttggatgtcgaggccctccggcggcagctggtccaggaacaggagaatgtcaagcaggctcacttgaggaatgagcatttccagaaggccatagaagacaaaagcaggagcctcaatgagagtaaaatagagatcgaaaggctacagtcgctcacggagaacctgaccaaggaacacttgatgctggaggaagagctgaggaacctgaggctggagtacgacgacctgcggaggggccggagtgaagcggacagcgataaaaactcaaccatctccgagctaaggagccaactgcagatcagcaacaatcgaaccctcgagctgcaggggctgattaatgatttacagagagagagggaaaatttgagacaggaaattgagaaattccaaaagcaggctttagaggcatctaataggatccaggagtcaaagagtcagtgcactcaagttgttcaggagagagagagcctgctggtgaagatcaaagtcctggagcaagacaaggcgaggctgcagcggctggaggatgagctgaaccgtgccaaagcaacgctggaggcagaaagccgggtgaaacagcgtctggagtgtgagaagcagcagatccagaacgacctgaaccagtggaaaactcagtattcccgcaaggaggagaccattaggaagatagagtcggaaagagagaagagcgagcgagaaaagaacagtctcaggagtgagatcgagaggctccaggcggagatcaagaggatcgaagagagatgcaggaggaagctagaggattcttctagggagactcagtcccagctggaatccgaacgctgcaggcttcagaaggagatcgagaaactcaggcagcgcccctacgggtcccatcgggagacccagacggaatacgagtggaccgttgattcctccaagctggtatttgatgggctgaggaagaaggtgacggcaatgcagctctatgagtgccagctgatcgacaagacgacgctagacaagctgttgaaggggaagaagtcagtggaggaggtggcctcagagatccagcctttcctgcgcggcgcaggcgccatcgccggggcttccgcttctcccaaggaaaagtactctttggtggaggccaagagaaagaaattcatcaccccagaatccactgtcatgcttctggaggcccaggcagccaccggtggtatcatcgatccccatcggaatgagaagctcactgtggacaatgccgtagcccgggatctcatcgacttcgacgaccgccaacagatctacacagcggagaaagccatcactggtttcgatgacccgttttcgggcaagacggtctctgtttcagaagccatcaagaagaatttgatcgacagagaaaccggaatgcgcctgctggaagcccagcttgcttcagggggtgtagttgatccagtcaacagtgtcttcttgccaaaagatgtcgccttggcccgtgggctgattgatagagatttgtatcgctccttgaacgatccccgagatagtcagaagaacttcgtggatccaatcaccaagaagaaggtcagctacatgcagctgagagaaaggtgcagaatcgaaccccacacgggtctgctcctgctgtcagtacagaagagaagcatgtccttccagggaatcagacaacccgtgaccgtcaccgaactggttgattctggcatattgagaccgtccactgtaaacgaactggaatccggtcagatttcctatgatgaggttggggagagaatcaaggacttcctccagggttcaagctgcatagcaggcatatataatgagaccactaagcagaagctgggcatctatgaggccatgaaaataggcttagttcgacctggtaccgccctggagttgctggaagcccaagcagctactggctttattgtggatcccgtcagcaatttaaggctacctgtggaggaagcctacaagagaggtctggtgggcattgagttcaaagagaagcttctgtctgcggaacgagccgtcactggctacaacgatcctgagaccggaaacatcatctctttattccaagcaatgaacaaggagctcatcgaaaagggccatggcattcgcttgctggaggcacagatcgcaaccggcggcatcatcgacccgaaggagagccatcggttaccggttgacatggcgtataagaggggttattttaatgaggagcttagcgaaatcctctcagacccaagtgatgataccaaaggctttttcgatccaaacacagaagaaaacctcacctatctgcaactgaaggagagatgcatcaaagatgaggaaacagggctctgcctgctgcccctgaaagagaagaagaaacaggtgcagacttctcagaagaacacgctcagaaagcggcgggtggtcatagttgacccggaaaccaataaggagatgtctgttcaggaggcctacaagaaaggtctcattgattatgacaccttcaaggagctatgtgaacaagagtgcgaatgggaagaaataaccatcacaggatcagacggctccaccagggtggtcttagtggacaggaagaccggcagtcagtatgacattcaagatgctattgacaagggcctcgttgacaggaagttcttcgatcaataccgatcaggcagccttagcctcacacagtttgctgacatgatctccttgaaaaacggcgtcggcaacagcagcggcttgggtgggagtgtcaacgatgatgtttttagcagctcccgacacgactccgtgagtaagatttccaccatatccagtgtcagaaatctaaccatccgaagcagctctctgtcagaccctctggaggagtcaagccccattgcggccatctttgacacagagaacctggagaaaatctcgatcgcagaaggtatagagcggggcattgtggatagcatcaccggtcagaggcttctggaggctcaggcctgcactggtggcatcattcaccctaccactggtcagaagctctcccttcaagatgcagtcaaccagggtctcattgaccaagacatggccaccaggctgaagcctgcccagaaggccttcatcggctttgaaggggtaaaaggaaagaagaagatgtcggcagcagaggcagtcaaagagaaatggcttccctacgaggcaggccagcgcttcctggagttccagttcctcacgggaggccttgttgacccggaagtgcatgggaggatcagcaccgaagaagccatccgcaaaggtttcatcgatggccgtgcagctcagaggttgcaggacatcagcagctatgccaaaatcctcacctgccccaaaaccaagttaaaaatctcctacaaggatgccatgaatcgctccatggtggaagacatcactgggttgcgccttctggaagccgcctccgtgtcctcgaagggtttgcctagcccttataacatgtcagccccaggctcccgctctggttcaaggtccggatctcgctcaggctcccgctctggctcccgcagcgggtctcggagaggaagcttcgatgctacgggcaattcttcttactcctattcctattcatttagcagtagctccattggggggtactag

SEQ ID NO: 42 - protein, 2949 aa, Mus musculus
MSCNGGSHPRINTLGRMTRAESGPDLRYEMTYSALAERVTLEKALWRPGLGAAEEPTAQRAGSSSRDSRVNTARESLVGGRSQTGTMSRHQNQNTIQEMLQNCSDCLMRAELIAQPELKFGEGMQLAWNRELDEYFTQANDQMEIIDGLIREMRQMGQPCDAYQKRQQQQQRPLVELLPFQEANVKLYLIKLLQLQEQMRALYKAISVPRVRRASSKGAGGYTCQSGSGWDEFTKRLTGECLGWMRQQREEMDLMAWGVDAGSVEQHINSHRSIHNTIGDYRWQLDKIKADLCLLSSLLHGSKIQRIRNRISFSKVLSDRREKSAIYQLEEEYENLLKASFERMDHLRQLQNIIQATSREIMWINDCEEEELLYDWSDKNTNIAQKQEAFSIRMSQLEVKEKELNKLKQESDQLVLNQHPASDKIEAYMDTLQTQWSWILQITKCIDVHLKENAAYFQFFEEAQSTEAYLKGLQDSIRKKYPCDKNMPLQHLLEQIKELEKEREKIIEYKRQVQNLVNKSKKIVQLKPRNPDYRSNKPIILRALCDYKQDQKIVHKGDECILKDNNERSKWYVTGPGGVDMLVPSVGLIIPPPNPLAVDLSCKIEQYYEAILALWNQLYINMKSLVSWHYCMIDIEKIRAMTIAKLKTMRQEDYMKTIEDLELHYQDFIKNSQGSEMFGDDDKRRMQSQFTDAQKHYQTLVIQLPGHPQHQTVTKTEITHLGTCQDVNHNKVIETNRENDKQETWLLMELQKIRRQMEHCEARMTLKNLLLAEQGSTHHITVKINELKSVQNDSQALAEVLNQLKDMLANFRGSEKYCYLQNEIFGLFQKLENINGVSDGYLNSLCSVRALLQAILQTEDMLKVYEARLTEEETVCLDLDKVEAYRCGLKKIKNDLNLKKSLLATMKTELQKAQQIHSQSSQQYPLYDLDLGKFTEKVTQLTDRWQKIDKQIDFRLWDLEKQIKQLRNYRDNYQSFCKWLYDAKRRQDSLESMKFGDSNTVMRFLNEQKNLHSEISGKRDKSEEVHKIAELCANSIKDYELQLASYTSGLETLLNIPIKRTMVQSPSGVILQEAADIHARYIELLTRSGDYYRFLSEMLKSLEDLKLKNTKIEVLEEELRLARDANSENCNKNKFLDQNLQKYQAECSQFKAKLVSLEELKRQAELDGKSAKQNLDKCYGQIKELNEKITRLTYEIEDEKRRRKTVEDRFDQQKNDYDQLQKARQCEKENLSWQKLESEKAIKEKEYEIERLRVLLQEEGARKREYENELAKVRNHYNEEMSNLRNKYETEINITKTTIKEISMQKEDDSKNLRNQMDRLSRENRDLKDEIVRLNDSILQATEQRRRAEENALQQKACGSETMQKKQRLEIELKQVIQQRSEDNARHKQSLEEAAKTIQDKNKEIERLKAEYQEEAKRRWEYENELSKVRNSYDEEIISLKNQFETEINITKTTIHQLTMQKEEDTSGYRAQIDNLTRENRSLCEEVKRLKNTLAQTTENLRRVEENAQQQKATGSEMSQRKQQLEIELRQVTQMRTEESMRYKQSLDDAAKTIQDKNKEIERLKQLVDKETNERKCLEDENSKLQRVQYDLQKANNSATEAMSKLKVQEQELTRLRIDYERVSQERTVKDQDITRIQSSLKDLQLQKQKAEEELSRLKRTASDESSKRKMLEEELEAMRRSLKEQAVKITNLTQQLEQASIVKKRSEDDLRQQRDVLDGHVREKQRTQEELRRLSLDVEALRRQLVQEQENVKQAHLRNEHFQKAIEDKSRSLNESKIEIERLQSLTENLTKEHLMLEEELRNLRLEYDDLRRGRSEADSDKNSTISELRSQLQISNNRTLELQGLINDLQRERENLRQEIEKFQKQALEASNRIQESKSQCTQVVQERESLLVKIKVLEQDKARLQRLEDELNRAKATLEAESRVKQRLECEKQQIQNDLNQWKTQYSRKEETIRKIESEREKSEREKNSLRSEIERLQAEIKRIEERCRRKLEDSSRETQSQLESERCRLQKEIEKLRQRPYGSHRETQTEYEWTVDSSKLVFDGLRKKVTAMQLYECQLIDKTTLDKLLKGKKSVEEVASEIQPFLRGAGAIAGASASPKEKYSLVEAKRKKFITPESTVMLLEAQAATGGIIDPHRNEKLTVDNAVARDLIDFDDRQQIYTAEKAITGFDDPFSGKTVSVSEAIKKNLIDRETGMRLLEAQLASGGVVDPVNSVFLPKDVALARGLIDRDLYRSLNDPRDSQKNFVDPITKKKVSYMQLRERCRIEPHTGLLLLSVQKRSMSFQGIRQPVTVTELVDSGILRPSTVNELESGQISYDEVGERIKDFLQGSSCIAGIYNETTKQKLGIYEAMKIGLVRPGTALELLEAQAATGFIVDPVSNLRLPVEEAYKRGLVGIEFKEKLLSAERAVTGYNDPETGNIISLFQAMNKELIEKGHGIRLLEAQIATGGIIDPKESHRLPVDMAYKRGYFNEELSEILSDPSDDTKGFFDPNTEENLTYLQLKERCIKDEETGLCLLPLKEKKKQVQTSQKNTLRKRRVVIVDPETNKEMSVQEAYKKGLIDYDTFKELCEQECEWEEITITGSDGSTRVVLVDRKTGSQYDIQDAIDKGLVDRKFFDQYRSGSLSLTQFADMISLKNGVGNSSGLGGSVNDDVFSSSRHDSVSKISTISSVRNLTIRSSSLSDPLEESSPIAAIFDTENLEKISIAEGIERGIVDSITGQRLLEAQACTGGIIHPTTGQKLSLQDAVNQGLIDQDMATRLKPAQKAFIGFEGVKGKKKMSAAEAVKEKWLPYEAGQRFLEFQFLTGGLVDPEVHGRISTEEAIRKGFIDGRAAQRLQDISSYAKILTCPKTKLKISYKDAMNRSMVEDITGLRLLEAASVSSKGLPSPYNMSAPGSRSGSRSGSRSGSRSGSRSGSRRGSFDATGNSSYSYSYSFSSSSIGGY

SEQ ID NO: 43 - DNA, 6921 bp, Rattus norvegicus
  CDS (1)..(6921)
atgagctgcaacggcggctcccacccgcggatcaacacgctgggtcgcatgacccgcgcggagatgtactactcccggcgctgcactgtcaacgaccagaactccgacggctactggtgggtaccggccggccgccacctagctcaggctgggacctttggccagggagttgcccgtctcctgggccgaccaggaaacccaggtctaggccgaggaaagtgcattgccccgggtcacggaaggcaggacccggtatccctacgcccagcgctcacccctgtgaacagggagcgtggtcaaaccggcaccatgtccaggcatcagaaccagaacactatccaagaacttctgcaaaactgcgcagactgtctgatgcgggcagagctgatcgcacagccggaactgaagttcggagaaggaatccagctggcgtggaacagagaactggatgagtatttcactcaagccaatgatcagatggaaatcatagatggcttgatccgggagatgaggcagatgggccagccctgtgatgcgtatcagaaaagactgcttcagctccaggaacagatgcgagccctgtacaaggccatcagtgcccctcgagtgcgaagggccagctccaagggagggtacacttgtcagagtggctccgggtgggatgaattcaccaaacgcctgacgggcgagtgcctgggctggatgaggcagcagagggcggaaatggacctgatggcctggggtgtggactctggttcagtggagcagcacatcaacagccacaggagtatccacaatgccatcggagactaccgctggcaactggacaagatcaaagcagacctgcgtgagaagtccgcaatctatcaattggaggaggaatatgaaaacctgctgaaagcctccttcgagaggatggaccacctgcgccagttgcaaaacatcatccaggccacctcgagagagatcatgtggatcaatgactgtgaggaggaggagctgctgtatgactggagcgacaagaacacaaacatcgctcagaagcaggaggccttctctatccgcatgagtcaactggaagtcaaggaaaaggagctcaacaagcttaaacaagaaagtgaccaacttgtcctcaatcagcatccagcgtcagacaaaatcgaggcatatatggatactcttcagacacagtggagttggattctgcaaatcaccaagtgcatcgatgtccacctcaaagaaaatgctgcctactttcagttttttgaagaggcccagtcaactgaagcctacctgaagggactgcaggactccatcaggaagaaatacccctgtgacaagaacatgcccctccagcacctgctggagcagatcaaagagctggagaaagaacgggagaagatcctggaatacaagcgtcaggtgcagaacttggtgaacaagtccaagaagatcgtgcagctgaagcctcggaacccagactacagaagcaacaaacccattattctcagggccctctgcgactacaaacaagaccagaaaatcgtccacaagggggatgaatgcatcctcaaggacaacaatgagcgcagcaagtggtacgtgaccggccccggaggcgttgacatgcttgtcccttctgtgggcctgatcatccctcctccaaacccactggctgtggacctttcttgcaagattgagcagtactatgaagccatcttggctctgtggaaccagctctacatcaacatgaagagcctggtgtcttggcattactgtatgattgacatcgagaagatcagagccatgactattgccaagctgaaaaccatgagacaggaagattacatgaagaccattgaagacctggagctccattaccaagacttcatcaaaaacagccaaggctcggagatgttcggagacgatgacaaacggaggatgcagtctcagttcactgatgcccagaagcattaccagaccctggtcattcagcttcctggccacccccagcaccagacagtcaccaaaactgaaatcactcacgtgggtacctgccaggatgtcaaccacaataaagtaattgagactaacagagagaacgacaaacaggagacgtggctgctgatggagctgcagaagatccgcaggcagatggagcactgcgaggccagaatgacactcaaaaatctgctgctcacagaccagggctctacacacaacatcaccgtgaaaatcaacgagctcaagagtgtacagaacgactcacaagctctggccgaggttctcaatcagcttaaagacatgcttgccaacttccgagggtctgaaaagtactgctatttacagaatgagatatttggactatttcagaagctggaaaatatcaatggtgtcacagatggctacttaaacagcctgtgctctgtgagagcccttctccaggcaattctgcaaacggaagacatgttgaaggtctacgaagcgaggctgacggaggaggaaactgtctgtctggacctggataaagtggaggcttaccgctgcgggctgaagaaaataaaaaatgacttgaacttgaaaaagtcactgttggccaccatgaagacggagctgcagaaggcacagcagattcactcccagtcttcacagcagtacccgctctatgacctggacctgggcaaattcactgagaaagtgacacagctgacggatcgctggcaaaagatagataagcagatagactttagattgtgggacctggagaaacaaatcaaacaactgaggaattatcgtgacaactatcagagcttctgcaagtggctgtatgatgccaaacgccgccaggactctttggagtccatgaagttcggagattccaacacagtcatgcggtttttgaatgagcagaagaacctgcacaatgaaatatctggcaaacgggataaatcagaagaagtacataaaattgctgagctttgcgcaaactcaattaaggattatgaactccagctggcgtcatacacctcagggctggaaactctactgaacatacctattaagaggaccatggttcagtccccatctggggctgcggacatccatgcaaggtacatcgagctacttacaaggtctggagactactacagattcttaagtgagatgctgaagagcctagaagatctgaagctgaaaaacaccaagattgaagttttggaagaggagctaagactggcccgggatgccaactcggaaaattgcaataagaataagttcctagatcagaacctgcagaaataccaggccgagtgttcccagttcaaagcaaagcttgtgagcctggaggagctgaagagacaagctgagctggatgggaagtcagccaagcaaaacctagacaagtgctacggtcagatcaaagagctcaatgaaaagatcacccggctgacctatgagatcgaagacgagaagcgcaggagaaagaccgtggaggacaggttcgaccaacagaagaatgactatgatcagctgcagaaggcaaggcagtgtgaaaaggagagccttggctggcagaagctggagtctgagaaagccatcaaggagaaggagtacgagatagagaggttgagggttctgctgcaggaagagggcgcccggaagagagaatatgaaaatgagctggcaaaggcatctaataggattcaggagtcaaagagtcagtgcactcaagtcgttcaggagagagagagcctgctggtgaagattaaggtcctggagcaagacaaggcaaggctgcagcggctggaggacgagctgaaccgtgccaaagcaacgctggaggcagaaacccgggtgaaacagcgcctagagtgtgagaagcagcagatccagaacgacctgaaccagtggaaaactcaatactcccgcaaggaggagaccattaggaagatagagtcggaaagagagaagagtgagagagagaagaacagtcttaggagtgagattgagagactccaggcagagatcaagaggattgaagagaggtgcaggcggaagctagaggattctaccagggagactcagtcccagctggaaacggaacgctgcaggcttcagaaggagattgacaaactcaggcagcgcccctatgggtcccatcgggagacccagacagagtacgagtggaccgttgattcctccaagctggtatttgacggactgaggaagaaggtgacagcaatgcagctctatgagtgccagttgattgacaagacaacactggacaagctattgaaggggaagaagtcagtggaggaggtggcttcagagatccagcctttcctgcggggtgcgggggccatcgctggtgcttctgcttctcccaaggaaaaatactctttggtggaggccaagagaaagaaattcatcaccccagaatccacagtcatgcttctggaggcccaggcggccactggtggtatcatcgatccccatcggaatgagaagctcacggtggacaatgccatagctcgggacctcattgactttgatgaccgccaacagatctacacagccgagaaagccatcactggttttgatgacccgttttcaggcaagaccgtatctgtttcagaagccatcaagaagaatttgattgacagagaaaccggaatgcgcctgctggaagcccagcttgcttcagggggtgtagttgatccagtcaacagtgtctttttgccaaaagatgtagccttggcccgtgggctgattgatagggatttgtatcgctccttgaatgacccccgagatagccagaagaacttcgtggatccaatcaccaagaagaaggtcagctacatgcagctgagagaacggtgcagaatcgaaccccacacgggtctgctcctgctgtcagtacagaagagaagcatgtccttccaaggaatcagacagccagtgaccgtcaccgaactggttgattctggcatattgagaccatccaccgtaaatgaactggaatctggtcagatttcttatgacgaggttggcgagagaattaaggacttcctccaggggtcaagctgcatagcaggtatttataatgagaccacgaaacagaagcttggcatctacgaggctatgaaaattggcttagttcgacctggtaccgctctggagttgctggaagcccaagcagctactggttttatagtagatcctgtcagcaatttaaggttacctgtggaggaagcctacaaaagaggtctggtgggcattgagttcaaagagaagcttctctctgcagaacgagctgtcactggctataacgatcctgaaaccggaaacatcatctctttgttccaagcgatgaacaaggaactcatcgaaaagggccacggaattcgcttactggaggctcagatcgcaaccggcggtatcattgatccaaaggagagtcatcggttaccggttgacatggcttataagaggggctattttaacgaggagcttagcgaaatcctctcagacccaagtgatgataccaaaggctttttcgatcccaacactgaagaaaacctcacctatttgcaactgaaagaaaggtgcatcaaagatgaggagacggggctctgcctgctgcctctgaaagaaaagaagaaacaggtgcagacttcacagaagaacaccctcagaaagcggcgggtggtaatagttgacccagaaaccaacaaagagatgtctgttcaggaggcgtacaagaaaggccttattgattatgaaaccttcaaagagctgtgtgagcaggagtgtgaatgggaagaaataaccatcacgggttcggatggctccaccagggtagtcctagtagacaggaagacgggcagtcagtatgacattcaagatgctattgacaaaggcctcgtcgacaggaagttcttcgatcaataccgatccggcagcctcagcctcacgcagtttgcggacatgatctccttgaagaatggcgttggcaccagcagcggcttgagcgggagtgtcaacgatgatgtgtttagcagctctcgacacgaatccgtgagtaagatttccaccatatccagcgtcagaaatttaaccatccgaagcagctctctgtctgaccccctggaggagtcaagccccattgcggccatctttgacacagaaaacctggagaaaatctccattacagaaggtatagagcggggcattgtggatagcatcactggtcagaggcttctggaagctcaggcctgcacgggtggcatcatccaccctaccaccggtcagaagctgtcccttcaagacgcagtctcccagggtctcattgaccaagacatggccaccaggctgaagcccgcccagaaggccttcattggctttgaaggtgtcaaaggaaagaagaagatgtcagcagcagaggcagtgaaagaaaaatggctgccctacgaggcaggccagcgcttcctggagttccagttcctcaccggaggccttgttgacccggaagtacatgggaggatcagcaccgaagaagccatccgcaaaggtttcatcgatggccgtgcagctcagaggttgcaggacatcagcagctatgccaaaatcctcacctgccccaaaaccaaattaaaaatctcctacaaggatgccatgaatcgctccatggtggaagacatcactgggctgcgccttctggaagccgcctccgtgtcctcgaagggtttgcctagcccttataacatgtcggccccaggctcccgctctggctcgaggtccggatctcgctcaggctcccgctctggttcccgtagtgggtctcgaagaggaagcttcgatgcgaccgggaattcctcctactcctattcctattcatttagcagtagctccattgggtactag

SEQ ID NO: 44 - protein, 2306 aa, Rattus norvegicus
MSCNGGSHPRINTLGRMTRAEMYYSRRCTVNDQNSDGYWWVPAGRHLAQAGTFGQGVARLLGRPGNPGLGRGKCIAPGHGRQDPVSLRPALTPVNRERGQTGTMSRHQNQNTIQELLQNCADCLMRAELIAQPELKFGEGIQLAWNRELDEYFTQANDQMEIIDGLIREMRQMGQPCDAYQKRLLQLQEQMRALYKAISAPRVRRASSKGGYTCQSGSGWDEFTKRLTGECLGWMRQQRAEMDLMAWGVDSGSVEQHINSHRSIHNAIGDYRWQLDKIKADLREKSAIYQLEEEYENLLKASFERMDHLRQLQNIIQATSREIMWINDCEEEELLYDWSDKNTNIAQKQEAFSIRMSQLEVKEKELNKLKQESDQLVLNQHPASDKIEAYMDTLQTQWSWILQITKCIDVHLKENAAYFQFFEEAQSTEAYLKGLQDSIRKKYPCDKNMPLQHLLEQIKELEKEREKILEYKRQVQNLVNKSKKIVQLKPRNPDYRSNKPIILRALCDYKQDQKIVHKGDECILKDNNERSKWYVTGPGGVDMLVPSVGLIIPPPNPLAVDLSCKIEQYYEAILALWNQLYINMKSLVSWHYCMIDIEKIRAMTIAKLKTMRQEDYMKTIEDLELHYQDFIKNSQGSEMFGDDDKRRMQSQFTDAQKHYQTLVIQLPGHPQHQTVTKTEITHVGTCQDVNHNKVIETNRENDKQETWLLMELQKIRRQMEHCEARMTLKNLLLTDQGSTHNITVKINELKSVQNDSQALAEVLNQLKDMLANFRGSEKYCYLQNEIFGLFQKLENINGVTDGYLNSLCSVRALLQAILQTEDMLKVYEARLTEEETVCLDLDKVEAYRCGLKKIKNDLNLKKSLLATMKTELQKAQQIHSQSSQQYPLYDLDLGKFTEKVTQLTDRWQKIDKQIDFRLWDLEKQIKQLRNYRDNYQSFCKWLYDAKRRQDSLESMKFGDSNTVMRFLNEQKNLHNEISGKRDKSEEVHKIAELCANSIKDYELQLASYTSGLETLLNIPIKRTMVQSPSGAADIHARYIELLTRSGDYYRFLSEMLKSLEDLKLKNTKIEVLEEELRLARDANSENCNKNKFLDQNLQKYQAECSQFKAKLVSLEELKRQAELDGKSAKQNLDKCYGQIKELNEKITRLTYEIEDEKRRRKTVEDRFDQQKNDYDQLQKARQCEKESLGWQKLESEKAIKEKEYEIERLRVLLQEEGARKREYENELAKASNRIQESKSQCTQVVQERESLLVKIKVLEQDKARLQRLEDELNRAKATLEAETRVKQRLECEKQQIQNDLNQWKTQYSRKEETIRKIESEREKSEREKNSLRSEIERLQAEIKRIEERCRRKLEDSTRETQSQLETERCRLQKEIDKLRQRPYGSHRETQTEYEWTVDSSKLVFDGLRKKVTAMQLYECQLIDKTTLDKLLKGKKSVEEVASEIQPFLRGAGAIAGASASPKEKYSLVEAKRKKFITPESTVMLLEAQAATGGIIDPHRNEKLTVDNAIARDLIDFDDRQQIYTAEKAITGFDDPFSGKTVSVSEAIKKNLIDRETGMRLLEAQLASGGVVDPVNSVFLPKDVALARGLIDRDLYRSLNDPRDSQKNFVDPITKKKVSYMQLRERCRIEPHTGLLLLSVQKRSMSFQGIRQPVTVTELVDSGILRPSTVNELESGQISYDEVGERIKDFLQGSSCIAGIYNETTKQKLGIYEAMKIGLVRPGTALELLEAQAATGFIVDPVSNLRLPVEEAYKRGLVGIEFKEKLLSAERAVTGYNDPETGNIISLFQAMNKELIEKGHGIRLLEAQIATGGIIDPKESHRLPVDMAYKRGYFNEELSEILSDPSDDTKGFFDPNTEENLTYLQLKERCIKDEETGLCLLPLKEKKKQVQTSQKNTLRKRRVVIVDPETNKEMSVQEAYKKGLIDYETFKELCEQECEWEEITITGSDGSTRVVLVDRKTGSQYDIQDAIDKGLVDRKFFDQYRSGSLSLTQFADMISLKNGVGTSSGLSGSVNDDVFSSSRHESVSKISTISSVRNLTIRSSSLSDPLEESSPIAAIFDTENLEKISITEGIERGIVDSITGQRLLEAQACTGGIIHPTTGQKLSLQDAVSQGLIDQDMATRLKPAQKAFIGFEGVKGKKKMSAAEAVKEKWLPYEAGQRFLEFQFLTGGLVDPEVHGRISTEEAIRKGFIDGRAAQRLQDISSYAKILTCPKTKLKISYKDAMNRSMVEDITGLRLLEAASVSSKGLPSPYNMSAPGSRSGSRSGSRSGSRSGSRSGSRRGSFDATGNSSYSYSYSFSSSSIGY

SEQ ID NO: 45 - DNA, 10353 bp, Pan troglodytes
  CDS (1)..(9645)
atggagaagagaggagggcactgcagtgggagagggcaggaaccaaagcacagaggcaggaaggcacctgggattgagtattgggattcggctgtggagggagtggcctgccaggctgcggagtgtgtatcttacctgtggatagtgggagccaatgaagattcccaaactgctaagcagttaaaactcaaggagccgtcggacaggtttaacgagagtgaagtgtgccgctccacacccacctttgcaagacagaactgcttcacggttcataaacattttggaaacgcactgtatcagaagaaacagcttttcatggatggtgtgactgggtctgtatccaaacccggttcggttcctggagccaacggtgtagttaacactcagcctcttgcagttaacactcagcctcttaactgggagtggccctggagcaagtcgctggaatgttcaagctccgcgtcactcatcggtaccaactccgacgcagctcctctgcgcccttgccgccctccgagccacagctcttcctcccgctcctgcccccggcccgtcgccgtctccgcgctcgcagcggcctcgggagggcccaggtggcgagcagcgacctcgcgagccttccgcactcccgcccggttccccggccgtccgcctatccttggccccctccgctttctccgcgccggcccgcctcgcttatgcctcggcgctgagccgctctcccgattgcccgccgacatgagctgcaacggaggctcccacccgcggatcaacactctgggccgcatgatccgcgccgagtctggcccggacctgcgctacgaggtgacgagtggcggcgggggcaccagcaggatgtactactcgcggcgcggcgtgatcaccgaccagaactcggacggctactggtgggtacctgcccggagagcgcgggctgcggggctcgcgggacagggagggaccatcctcctctggacgactgggagaatcgagtcccgaagccgggcgggtggtcagagggggcgtcgggcccgcgcggggctgtcccctgcctgctggacacggctgcagccgcctttgtcccagcccgcgaatgggaggtcaggcgaggtggggctgcgaccacaaaacccaacctctccaaccgtaatcaaagtaaaagaggaaaggagcggggccccggtcctgtctggtggccgagtggtgctcggggctccgcagtctctaccggctcacccccaatccccagtaaccccgagaccacgactgcaacgactcctggactcctcggccacccaaggacgtttgtatcaaggctgcgcgtcccggcggcgcggggtcctgtcccgaggaggcgcttcggcttcccctcaaactacaaacaccatccaggagctgctgcagaactgctccgactgcttgatgcgagcagagctcatcgtgcagcctgaattgaagtatggagatggaatacaactgactcggagtcgagaattggatgagtgttttgcccaggccaacgaccaaatggaaatcctcgacagcttgatcagagagatgcggcagatgggccagccctgtgatgcttaccagaaaaggcttcttcagctccaagagcaaatgcgagccctttataaagccatcagtgtccctcgagtccgcagggccagctccaagggtggtggaggctacacttgtcagagtggctctggctgggatgagttcaccaaacatgtcaccagtgaatgtttgggatggatgaggcagcaaagggcggagatggacatggtggcctggggtgtggacctggcctcagtggagcagcacattaacagccaccggggcatccacaactccatcggcgactatcgctggcagctggacaaaatcaaagccgacctgcgtgagaaatctgcgatctaccagtggagggaggagtatgaaaacctgctgaaagcgtcctttgagaggatggatcacctgcgacagctgcagaacatcattcaggccacgtccagggagatcatgtggatcaatgactgcgaggaagaggagctgctgtacgactggagcgacaagaacaccaacatcgctcagaaacaggaggccttctccatacgcatgagtcaactggaagttaaagaaaaagagctcaataagctgaaacaagaaagtgaccaacttgtcctcaatcagcatccagcttcagacaaaattgaggcctatatggacactctgcagacgcagtggagttggattcttcagatcaccaagtgcattgatgttcatctgaaagaaaatgctgcctactttcagttttttgaagaggcgcagtcaactgaagcatacctgaaggggcttcaggactccatcaggaagaagtaccgaagcgacaagaacatgcccctgcagcacctgctggaacagatcaaggagctggagaaagaacgagagaaaatccttgaatacaagcgtcaggtgcagaacttggtaaacaagtctaagaagattgtacagctgaagcctcgtaacccagactacagaagcaataaacccattattctcagagctctctgtgactacaaacaagaccagaaaattgtgcataagggggatgagtgtatcctgaaggacaacaacgagcgcagcaagtggtacgtgacgggcccgggaggcgttgacatgctcgttccctctgtggggctgatcatccctcctccgaacccactggccctgaaaacaatgcggcaggaagattacatgaagacgatagccgaccttgagttacattaccaagagttcatcagaaatagccaaggctcagagatgtttggagatgatgacaagcggaaaatacagtctcagttcaccgatgcccagaagcattaccagaccctggtcattcagctccctggctatccccagcaccagacagtgaccacaactgaaatcactcatcatggaacctgccaagatgtcaaccataataaagtaattgaaaccaacagagaaaatgacaagcaagaaacatggatgctgatggagctgcagaagattcgcaggcagatagagcactgcgagggcaggatgactctcaaaaacctccctctagcagaccaggggtcttctcaccacatcacagtgaaaattaacgagcttaagagtgtgcagaatgattcacaagcaattgctgaggttctcaaccagcttaaagatatgcttgccaacttcagaggttctgaaaagtactgctatttacagaatgaagtatttggactatttcagaaactggaaaatatcaatggtgttacagatggctacttaaatagcttatgcacagtaagggcactgctccaggctattctccaaacagaagacatgttaaaggtttacgaagccaggctccctgaggaagaaactgtctgcctggacctggataaagcggaagcttaccgctgtggactgaagaaaataaaaaatgacttgaacttgaagaagtcgttgttggccactatgaagacagaactacagaaagcccagcagatccactctcagacttcacagcagtatccgctttatgatctggacttgggcaagttcggtgaaaaagtcacacagctgacagaccgctggcaaaggatagataaacagatcgactttagattatgggacctggagaaacaaatcaagcaattgaggaattatcgtgataactatcaggctttctgcaagtgggtctatgatgctaaacgccgccaggattccttagaatccatgaaatttggagattccaacacagtcatgcggtttttgaatgagcagaagaacttgcacagtgaaatatctggcaaacgagacaaatcagaggaagtacaaaaaattgctgaactttgcgccaattcaattaaggattatgagctccagctggcctcatacacctcaggactggaaactctgctgaacatacctatcaagaggaccatgattcagtccccttctggggtgattctgcaagaggctgcagatgttcatgctcggtacattgaactacttacaagatctggagactattacaggttcttaagtgagatgctgaagagtttggaagatctgaagctgaaaaataccaagatcgaagttttggaagaggagctcagactggcccgagatgccaactcggaaaactgtaataagaacaaattcctggatcagaacctgcagaaataccaggcagagtgttcccagttcaaagcgaagcttgcgagcctggaggagctgaagagacaggctgagctggatgggaagtcggctaagcaaaatctagacaagtgctacggccaaataaaagaactcaatgagaagatcacccgactgacttatgagattgaagatgaaaagagaagaagaaaatctgtggaagacagatttgaccaacagaagaatgactatgaccaactgcagaaagcaaggcaatgtgaaaaggagaaccttggttggcagaaattagagtctgagaaagccatcaaggagaaggagtacgagattgaaaggttgagggttctactgcaggaagaaggcacccggaagagagaatatgaaaatgagctggcaaaggtaagaaaccactataatgaggagatgagtaatttaaggaacaagtatgaaacagagattaacattacgaagaccaccatcaaggagatatccatgcaaaaagaggatgattccaaaaatcttagaaaccagcttgatagactctcaagggaaaatcgagatctgaaggatgaaattgtcaggctcaatgacagcatcttgcaggccactgagcagcgaaggcgagctgaagaaaatgcccttcagcaaaaggcctgtggctctgagataatgcagaagaagcagcatctggagatagaactgaagcaggtcatgcagcagcgctctgaggacaatgcccggcacaagcagtccctggaggaggctgccaagaccattcaggacaaaaataaggagatcgagagactcaaagctgagtttcaggaggaggccaagcgccgctgggaatatgaaaatgaactgagtaaggtaagaaacaattatgatgaggagatcattagcttaaaaaatcagtttgagaccgagatcaacatcaccaagaccaccatccaccagctcaccatgcagaaggaagaggataccagtggctaccgggctcagatagacaatctcacccgagaaaacaggagcttatctgaagaaataaagaggctgaagaacactctaacccagaccacagagaatctcaggagggtggaagaagacgtccaacagcaaaaggccactggctctgaggtgtctcagaggaaacagcagctggaggttgagctgagacaagtcactcagatgcgaacagaggagagcgtaagatataagcaatctcttgatgatgctgccaaaaccatccaggataaaaacaaggagatagaaaggttaaaacaactgatcgacaaagaaacaaatgaccggaaatgcctggaagatgaaaacgcgagattacaaagggtccagtatgacctgcagaaagcaaacagtagtgcgacggagacaataaacaaactgaaggttcaggagcaagaactgacacgcctgaggatcgactatgaaagggtttcccaggagaggactgtgaaggaccaggatatcacgcggttccagagctctctgaaagagctgcagctgcagaagcagaaggtggaagaggagctcaatcggctgaagaggacggcgtcagaagactcctgcaagaggaagaagctggaggaagagctggaaggcatgaggaggtcgctgaaggagcaagccatcaaaatcaccaacctgacccagcagctggagcaggcatccattgttaagaagaggagtgaggatgacctccggcagcagagggacgtgctggatggccacctgagggaaaagcagaggacccaggaagagctgaggaggctgtcttctgaggtcgaggccctgaggcggcagttactccaggaacaggaaagtgtcaaacaagctcacttgaggaatgagcatttccagaaggcgatagaagataaaagcagaagcttaaatgaaagcaaaatagaaattgagaggctgcagtctctcacagagaacctgaccaaggagcacttgatgttagaagaagaactgcggaacctgaggctggagtacgatgacctgaggagagggcgaagcgaagcggacagtgataaaaatgcaaccatcttggaactaaggagccagctgcagatcagcaacaaccggaccctggaactgcaggggctgattcatgatttacagagagagagggaaaatttgagacaggaaattgagaaattccaaaagcaggctttagaggcatctaataggattcaggaatcaaagaatcagtgtactcaggtggtacaggaaagagagagccttctggtgaaaatcaaagtcctggagcaagacaaggcaaggctgcagaggctggaggatgagctgaatcgtgcaaaagcaactctagaggcagaaaccagggtgaaacagcgcctggagtgtgagaaacagcaaattcagaatgacctgaatcagtggaagactcaatattcccgcaaggaggaggctattaggaagatagaatcggaaagagaaaagagtgagagagagaagaacagtcttaggagtgagatcgaaagactccaagcagagatcaagagaattgaagagaggtgcaggcgtaagctggaggattctaccagggagacacagtcacagttagaaacagaacgctcccgatatcagagggagatcgataaactcagacagcgcccatatgggtcccatcgagagacccagactgactgtgagtggaccgttgacacctccaagctggtgtttgatgggctgaggaagaaggtgacagcaatgcagctctatgagtgtcagctgatcgacaaaacaaccttggacaaactattgaaggggaagaagtcagtggaagaagttgcttctgaaatccagccattccttcggggtgcaggatctatcgctggagcatctgcttctcctaaggaaaaatactctttggtagaggccaagagaaagaaattaatcagcccagaatccacagtcatgcttctggaggcccaggcagctacaggtggtataattgatccccatcggaatgagaagctgactgtcgacagtgccatagctcgggacctcattgacttcgatgaccgtcagcagatatatgcagcagaaaaagctatcactggttttgatgatccattttcaggcaagacagtatctgtttcagaagccatcaagaaaaatttgattgatagagaaaccggaatgcgcctgctggaagcccagattgctgcagggggtgtagtagaccctgtgaacagtgtctttttgccaaaagatgtcgccttggcccgggggctgattgatagagatttgtatcgatccctgaatgatccccgagatagtcagaaaaactttgtggatccagtcaccaaaaagaaggtcagttacgtgcagctgaaggaacggtgcagaatcgaaccacatactggtctgctcttgctttcagtacagaagagaagcatgtccttccaaggaatcagacaacctgtgaccgtcactgagctagtagattctggtatattgagaccgtccactgtcaatgaactggaatctggtcagatttcttatgacgaggttggtgagagaattaaggacttcctccagggttcaagctgcatagcaggcatatacaatgagaccacaaaacagaagcttggcatttatgaggccatgaaaattggcttagtccgacctggtactgctctggagttgctggaagcccaagcagctactggctttatagtggatcctgttagcaacttgaggttaccagtggaggaagcctataagagaggtctggtgggcattgagttcaaagagaagctcctgtctgcagaacgagctgtcactgggtataatgatcctgaaacaggaaacatcatctctttgttccaagccatgaataaggaactcatcgaaaagggccatggtattcgcttattagaagcacagatcgcaaccggggggatcattgacccaaaggagagccatcgtttaccagttgacatagcatataagaggggctatttcaatgaggaactcagtgagattctctcagatccaagtgatgataccaaaggattttttgaccccaacactgaagaaaatcttacctatctgcaactaaaagaaagatgcattaaggatgaggaaacagggctctgtcttctgcctctgaaagaaaagaagaaacaggtgcagacatcacaaaagaataccctcaggaagcgtagagtggtcatagttgacccagaaaccaataaagaaatgtctgttcaggaggcctacaagaagggcctaattgattatgaaaccttcaaagaactgtgtgagcaggaatgtgaatgggaagaaataaccatcacgggatcagatggcaccaccagggtggtcctggtagatagaaagacaggcagtcagtatgatattcaagatgctattgacaagggccttgttgacaggaagttctttgatcagtaccgatccggcagcctcagcctcactcaatttgctgacatgatctccttgaaaaatggtgttggcaccagcagcagcatgggcagtggtgtcagcgatgatgtttttagcagctcccgacatgaatcagtaagtaagatttccaccatatccagcgtcaggaatttaaccataaggagcagctctttttcagacaccctggaagaatcgagccccattgcagccatctttgacacagaaaacctggagaaaatctccattacagaaggtatagagcggggcatcgttgacagcatcacgggtcagaggcttctggaggctcaggcctgcacaggtggcatcatccacccaaccacgggccagaagctgtcacttcaggacgcagtctcccagggtgtgattgaccaagacatggccaccaggctgaagcctgctcagaaagccttcataggcttcgagggtgtgaagggaaagaagaagatgtcagcagcagaggcagtgaaagaaaaatggctcccgtatgaggctggccagcgcttcctggagttccagtacctcacgggaggtcttgttgacccggaagtgcatgggaggataagcaccgaagaagccatccggaaggggttcatcgatggccgcgccgcacagaggctgcaagacaccagcagctatgccaaaatcctgacctgccccaaaaccaaattaaaaatatcctataaggatgccataaatcgctccatggtagaagatatcactgggctgcgccttctggaagctgcctccgtgtcgtccaagggcttacccagcccttacaacatgtcttccgctccgggctcccgctccggctcccgctcgggatctcgctccggatctcgctccgggtcccgcagtgggtcccggagaggaagctttgacgccacagggaattcttcctactcttattcctactcatttagcagtagttctattgggcactagtagtcagttgggagtggttgctataccttgacttcatttatatgaatttccactttattaaataataaaaaagaaaatcccggtgcttgcagtagagtgataggacattctatgcttacagaaaatatagccatgattgaaatcaaatagtaaaggctgttctggctttttatcttcttagctcatcttaaataagcagtacacttggatgcagtgcgtctgaagtgctaatcagttgtaacaatagcacaaatcgaacttaggatttgtttcttctcttctgtgtttcgatttttgatcaattctttaattttggaagcctataatacagttttctattcttggagataaaaattaaatggatcactgatattttagtcattctgcttctcatctaaatatttccatattccgtattaggagaaaattaccctcccagcaccagccccccctctcaaacccccaacccaaaaccaagcattttggaatgagtcccctttagttttagagtgtggactgtataacccatatactctttgatgtacttgtttggtttggtattaatttgactgtgcatgacagcggcaatctttgcttttctttggtcaaagttttctgtttattttgcttgtcatattcgatgtactttaagaaggtgtctttatgaagtttgctattctggcaataaacttttagacttttgaa

SEQ ID NO: 46 - protein, 3215 aa, Pan troglodytes
MEKRGGHCSGRGQEPKHRGRKAPGIEYWDSAVEGVACQAAECVSYLWIVGANEDSQTAKQLKLKEPSDRFNESEVCRSTPTFARQNCFTVHKHFGNALYQKKQLFMDGVTGSVSKPGSVPGANGVVNTQPLAVNTQPLNWEWPWSKSLECSSSASLIGTNSDAAPLRPCRPPSHSSSSRSCPRPVAVSALAAASGGPRWRAATSRAFRTPARFPGRPPILGPLRFLRAGPPRLCLGAEPLSRLPADMSCNGGSHPRINTLGRMIRAESGPDLRYEVTSGGGGTSRMYYSRRGVITDQNSDGYWWVPARRARAAGLAGQGGTILLWTTGRIESRSRAGGQRGRRARAGLSPACWTRLQPPLSQPANGRSGEVGLRPQNPTSPTVIKVKEERSGAPVLSGGRVVLGAPQSLPAHPQSPVTPRPRLQRLLDSSATQGRLYQGCASRRRGVLSRGGASASPQTTNTIQELLQNCSDCLMRAELIVQPELKYGDGIQLTRSRELDECFAQANDQMEILDSLIREMRQMGQPCDAYQKRLLQLQEQMRALYKAISVPRVRRASSKGGGGYTCQSGSGWDEFTKHVTSECLGWMRQQRAEMDMVAWGVDLASVEQHINSHRGIHNSIGDYRWQLDKIKADLREKSAIYQWREEYENLLKASFERMDHLRQLQNIIQATSREIMWINDCEEEELLYDWSDKNTNIAQKQEAFSIRMSQLEVKEKELNKLKQESDQLVLNQHPASDKIEAYMDTLQTQWSWILQITKCIDVHLKENAAYFQFFEEAQSTEAYLKGLQDSIRKKYRSDKNMPLQHLLEQIKELEKEREKILEYKRQVQNLVNKSKKIVQLKPRNPDYRSNKPIILRALCDYKQDQKIVHKGDECILKDNNERSKWYVTGPGGVDMLVPSVGLIIPPPNPLALKTMRQEDYMKTIADLELHYQEFIRNSQGSEMFGDDDKRKIQSQFTDAQKHYQTLVIQLPGYPQHQTVTTTEITHHGTCQDVNHNKVIETNRENDKQETWMLMELQKIRRQIEHCEGRMTLKNLPLADQGSSHHITVKINELKSVQNDSQAIAEVLNQLKDMLANFRGSEKYCYLQNEVFGLFQKLENINGVTDGYLNSLCTVRALLQAILQTEDMLKVYEARLPEEETVCLDLDKAEAYRCGLKKIKNDLNLKKSLLATMKTELQKAQQIHSQTSQQYPLYDLDLGKFGEKVTQLTDRWQRIDKQIDFRLWDLEKQIKQLRNYRDNYQAFCKWVYDAKRRQDSLESMKFGDSNTVMRFLNEQKNLHSEISGKRDKSEEVQKIAELCANSIKDYELQLASYTSGLETLLNIPIKRTMIQSPSGVILQEAADVHARYIELLTRSGDYYRFLSEMLKSLEDLKLKNTKIEVLEEELRLARDANSENCNKNKFLDQNLQKYQAECSQFKAKLASLEELKRQAELDGKSAKQNLDKCYGQIKELNEKITRLTYEIEDEKRRRKSVEDRFDQQKNDYDQLQKARQCEKENLGWQKLESEKAIKEKEYEIERLRVLLQEEGTRKREYENELAKVRNHYNEEMSNLRNKYETEINITKTTIKEISMQKEDDSKNLRNQLDRLSRENRDLKDEIVRLNDSILQATEQRRRAEENALQQKACGSEIMQKKQHLEIELKQVMQQRSEDNARHKQSLEEAAKTIQDKNKEIERLKAEFQEEAKRRWEYENELSKVRNNYDEEIISLKNQFETEINITKTTIHQLTMQKEEDTSGYRAQIDNLTRENRSLSEEIKRLKNTLTQTTENLRRVEEDVQQQKATGSEVSQRKQQLEVELRQVTQMRTEESVRYKQSLDDAAKTIQDKNKEIERLKQLIDKETNDRKCLEDENARLQRVQYDLQKANSSATETINKLKVQEQELTRLRIDYERVSQERTVKDQDITRFQSSLKELQLQKQKVEEELNRLKRTASEDSCKRKKLEEELEGMRRSLKEQAIKITNLTQQLEQASIVKKRSEDDLRQQRDVLDGHLREKQRTQEELRRLSSEVEALRRQLLQEQESVKQAHLRNEHFQKAIEDKSRSLNESKIEIERLQSLTENLTKEHLMLEEELRNLRLEYDDLRRGRSEADSDKNATILELRSQLQISNNRTLELQGLIHDLQRERENLRQEIEKFQKQALEASNRIQESKNQCTQVVQERESLLVKIKVLEQDKARLQRLEDELNRAKATLEAETRVKQRLECEKQQIQNDLNQWKTQYSRKEEAIRKIESEREKSEREKNSLRSEIERLQAEIKRIEERCRRKLEDSTRETQSQLETERSRYQREIDKLRQRPYGSHRETQTDCEWTVDTSKLVFDGLRKKVTAMQLYECQLIDKTTLDKLLKGKKSVEEVASEIQPFLRGAGSIAGASASPKEKYSLVEAKRKKLISPESTVMLLEAQAATGGIIDPHRNEKLTVDSAIARDLIDFDDRQQIYAAEKAITGFDDPFSGKTVSVSEAIKKNLIDRETGMRLLEAQIAAGGVVDPVNSVFLPKDVALARGLIDRDLYRSLNDPRDSQKNFVDPVTKKKVSYVQLKERCRIEPHTGLLLLSVQKRSMSFQGIRQPVTVTELVDSGILRPSTVNELESGQISYDEVGERIKDFLQGSSCIAGIYNETTKQKLGIYEAMKIGLVRPGTALELLEAQAATGFIVDPVSNLRLPVEEAYKRGLVGIEFKEKLLSAERAVTGYNDPETGNIISLFQAMNKELIEKGHGIRLLEAQIATGGIIDPKESHRLPVDIAYKRGYFNEELSEILSDPSDDTKGFFDPNTEENLTYLQLKERCIKDEETGLCLLPLKEKKKQVQTSQKNTLRKRRVVIVDPETNKEMSVQEAYKKGLIDYETFKELCEQECEWEEITITGSDGTTRVVLVDRKTGSQYDIQDAIDKGLVDRKFFDQYRSGSLSLTQFADMISLKNGVGTSSSMGSGVSDDVFSSSRHESVSKISTISSVRNLTIRSSSFSDTLEESSPIAAIFDTENLEKISITEGIERGIVDSITGQRLLEAQACTGGIIHPTTGQKLSLQDAVSQGVIDQDMATRLKPAQKAFIGFEGVKGKKKMSAAEAVKEKWLPYEAGQRFLEFQYLTGGLVDPEVHGRISTEEAIRKGFIDGRAAQRLQDTSSYAKILTCPKTKLKISYKDAINRSMVEDITGLRLLEAASVSSKGLPSPYNMSSAPGSRSGSRSGSRSGSRSGSRSGSRRGSFDATGNSSYSYSYSFSSSSIGH

SEQ ID NO: 47 - DNA, 6702 bp, Gallus gallus
  CDS (1)..(6702)
atgagcatgaacggcggctcgcacccgcggatcaacacgctgggccgcatggcgcgggccgactcgggcaccgacctgcgctacgagatgagctcccatgtggtgggcggcggcggcggcggcacccacacccacaagacctactattaccagaagacctacgggggggactacgcctccgacgggtacggtcagaatgggacctgtacagttaccagacgtcagaacaccattcaggagcttctgcaaaactgttcggattgcctgatgagagctgagctcatagtacaacctgaattgaaatatggtgatggtgtccagattagaggaaacagagatctggaagaatgttttgcgcaggcaaatgaccaaatggacatcctggatgggctgatccgagagctaaggcagatgaatcagccctgtgaaatgtatcagaaaaggctgctccaacttcaagagcaaatgcgagctctgtacaaagccattagtgttccccgtgccaggagggccagctccaaaggtggtggttgctactcctctcagagtggttcaggctgggatgagtacacaaaacgtgtgacaagtgaatgcttaaattggatgaggcaacagaaggctgaaatggagctggtgaaatgggggtttgatgcagcatctattgagcaacagattagtgaccatagaagaactcacaatgccattggagactatcgctggcacctggacaaagtcaaaacagatctgcgtgagaaggctgccgttcaccagctggaggaagaatacgaaggactgctgaaatactcctttgagagaatggatcagctccgtcaattccagaaccttatccaagcaaccagcagagagatcatgtggatcaatgactgtgaggaagaagagcttctctacgactggagcgacaggaacacagatatctccaggaagcaggaggccttctctaaacgtatgagtgaactggagcttaaagaaaaagaactcaacaagctaaagcaagaaagtgaccagcttgtgctcaaccagcaccctgcttcagacaaaattgaggcctacatggatacactacaaactcagtggagctggattcttcagatcacgaagtgcattgatgttcatttgaaagagaatgcagcttactttcagttctttgaggaggcccaagctacagagagctatctgaagaatttacaggactccatcagaaagaagttcatatgtgataagagcatgtcacttcagagcttgctggagcagatcaaagagctggagaatgaacgagagagaattcttgaatacaagaggcaagtgcagagtttggtgaataaatccaagaagattgtgcagctgaagccacgtaacccagattaccggagtaacaagcccattatcctcaaggctctatgtgactacaaacaggatctgaaaacagtgcgcaaaggagatgaatgcatcctgaaggacaacaatgagcgcagcaagtggttggtgactggccctggaggagtggatatgctggtgccatctgttagtctgatcatcccacccccaaatccattagcagtggatcttgctaccaaaattgagcaatactacgaagctattctggctttgtggaaccagctgtatatcaacatgaagagcctggtatcttggcattattgcatgattgacattgagaaaatcagagcgatgactattgctaagctgaaaacaatgcgtaaggaagattaccaaaaaataataactgacttggagatccattatcaagaattcctcaggaacagccaaggctctgagatgtttggtgatgaagacaaacgaaagatccagacgcagttcactgatgctcagaaacactaccaaaccttaataatacaactacccaatcaaccacggccaccccagacagtgattccaactgagagttgtcctgtgggtacctcaaacaccattatagttaatgagagaaaccgagaacatgataaacaggaggcttggctgctgatggaacttcagaaacttcggcgtcagattgaagcttctgagattcgaatggttcaaagagctccacttggtgtggatcaaggggctctgcatgacttttctgtcagaatacaggatttagagggtgtgcagaatgactctcaaataatggctgaaaccctcaataagcataaggacttgctgcctaacttcagaggctgtgaaaagtatgtgtacttgcaatcagagataaatgccctgtttcaaaaactggaaaacattaatggtgtttctgctggctacttagacagcttgaatgcactgaggtgtctgctccagcttattctacaaactgaagatgttatcagagtttttgaagtcagactatctgaagaagagactgttcctttggatcttgataaagtggaggcatatcgggcttgtctaaagaaaatgaaaagtgatctgaacatgaagaagtcactgttgaatacccttgaaaatgagctgcagaaaatgattcagattcactcacagtcttgccagtcatatactctgtatgatatggatgttggaaagttcactgacaaagttacccaattaatagaccgctggcagagagctgaaaagcagatagataacagatcatgggatttagaaagacagatcaaacagctgaaaacgtaccgggatctatatcaggctctgtgcaaatggatctgtgatgccaagcgcaggcaggattctattgagtccacaaagctgtgtgattccaacactattatgagatatctacatgatcagaagaacttgcacagtgaaatctgtgggaagcgagacaaagttgaagagcttctcaagcatgcagatcagtgctcagctgcaattaaggattatgagcttcaggttgcttcctacagttctggattagaaacgttgctcaacatacctatcaagaagtgtgtggttcagtctccagcagtgctgattctgcaagaggctagtgaggctcaggctcgctacatagagcttcttacaagatctggagattattacaaattcttaagtgaaatgttaaagagcatggaggacctgaagatgaaagccaccaaaattgaacttctggaagaagaactcagacttgccagggattcaaattcagaaacaaacaacaagcataaattcctggaacagaatctgcagaagtaccagatggacatttctcagctcaaagcaaagctgatgagtttggaggagatgaaaagacaggctgaaatggatggaaattctgctaagcaaaacctggacaaatgctatgcccaaataaaggatctaaatgacagaataaccaggttgacttacgagactgaagatgagaaaaggaaaaggaagttgctggaggacagatatgagcaacaaaagaatgactacgaccagctgcagaaaacaagacaaaacgagaaagacagccttggctggcagaagttagaatctgagaaggtcatcaaggagaaggagtacgagatagaaagattaagggttctcctgcaggatgaaggcacacggaagagggagtatgaaaatgagctggctaaggtaagaaaccagtttagcgaggagatgagtaatttaaagaacaagtatgaaacagaaattaatattaagaagaccacaatccagcagatagctgcacagaaagatgatgatgcaaaaggtctcagagcccaggttgacagactgtcaagagaaaacagagaccttaaggatgagattgtgaggctgaacgatgccattctgcaaaccacagatcagcggaggagggcagaagaagatgctcttcagcagaaggcttgcagttctgaggtgtcgcagcagaagcaccagttagagctggagctgaaacagatcattcagcttcgtggtgaagacaactcaagatacaagcaggctcttgaagaggctgctgctactattcaggataaaactaaggagctggaaaggctaaagcttcagcttcaggaagaagctaaaagccgatgggagcttgaaaatgagttggctaaggtaaggaacagttatgatgaggaaattattagcttaaagaacaaatatgaaacagagattaatatcacaaagaccacaattcatcaggtcactatgcaaaaggaagaggataccaataattatagaacacagcttgataatgctgtgagagaaaataggaatttgtgtgaggaaattaggagactgaagaatacaataactcaaacaacagataatctacggaaaatagaagagaatgctcagcagcaaaaggcagctggctcagagctttctcagaagaaacagcagctggagattgaactaaaacaagttattcagaggcactctgacgagagcatgcgatacaaacaatcgcttgatgatgcttctaagaccattaaagagagaaacaaagagattgaaaggctgagaaagttgttggatatccaaaaacataagctggaggaggaactttgcaggcagaataagaatgtgatggaggagacagccaggaggaagaaactggacgaggaagtagaaggcatgaggagatctctgagagagcaatcagttaaaataactaatctcacacagcagatagaggaagtgtctattgtaaagaagagaaatgaagatgaccttagacaccaaagagaagtactagatggccacgtgagagagaaacaaaggtacatggaggagataagaaaatacacctctgatcttgagactttacgtcgtcagttggtacaagaacaggagcaattaaaacaggctcacctgcgaaatgagcacttacagaaaacctctgaggagaagagcaaaaacttgaacgagtgcaaaattgaaatcgaaaggcttcagtctctcaccgagaacctaaccaaggaacacttgttactggaggaagaactgcgaaatgttagattggagtatgatgatctcaaaatggtcagaagtgaagttgatgagaaaaattctgccattgctgaactaaagaatcagcttcagacaagcagcaagcaaaccctggaacttcaggggttgattaatgatttacagaaagaaagggaaaaattgagacaggaaattgaaaaattccaaaagcaggctctggaggcatccaataggattcaagaatccaaaaatcagtataatcacattatgcaagaaagagaaaccttgctgataaaaatgagtgctctggagcaagacaaagccaggctgcagagattagaagaggagctgaaccgtttgaaagttaacctggaatcagagtctcgtttgaagcaacgcctggaaaatgagaaacaacaaattctgaatgacctcaaccaatggaagagccagcactcccggacggaggaatccataaggaagatccagtgtgagagagagaagagtgagagggagaagaacaccttgaggagtgagattgaaaggctgcagatggagattaaaaggattgaggagagataccggtgcagactggaagagactgctgtcaaaaaccagtcagagttggagtctgaacgtctcaggctgcagagagagattgagaaacttaaacaacgcccatatgggtctcacagatctactcagactgaagaagacttctgtattgatgcctccaagttgctgttcaatgggctgcggaagaaaattacagcaatgcagctatatgaatgtcagcttatagacaaactcactctggataaattgctgaaggggcagaggtcagtagaagaagttgctgctgacattgaaccctttctgaaaggggcaggtgctattgcaggagtgtctgttttacccagacagaagtactcctttgttgaggccaaacggaaccagctgcttacggcggaaaatgcagtcctgctcttggaagcccaggcagcaacaggaggagtgatagatccacaccgcaatgaggtgttaacagtggacagtgctattgccagagatctgattgactttgatgacagagaacaaatctatacagcagaaaaggctattacaggttttaaagatcctttctcaggcaaaactgtgccactatctgaagccatcaagaaaaacttggttgacagagaaattgggatgcgtctgcttgaagcccagctggctgtgggagggattgttgatcctgtcaacagtgttttcctacccaaagatgtagctttatcccgtggattgattgacaaagatctgtacaggattctaaacaactgccaaagtaccacaaagaacttcattgatcccagcaccaaaaaagcagtcacttacatgcagctaaaggaaaaatgcaggattgagccacatactggcttgctcctccttccagtgcagaagaggagtatgtcattccaagggatcaggcagcctgtctcagcagatgctcttcttgaggctggaattattaaggaatcaacaagaaatgatttggaaagaggtgcaatcacagtggaagaagtgagtgagaggattattgatttccttcagggctctagctgtattgcaggtatctacaatgaggctactaaagagaaacttggcatttaccaggctatgaaaataggcttggttagaccagagctgtcactgggtacaaagacccagaaactggaaacatcatttctctgtttcaagcaatga

SEQ ID NO: 48 - protein, 2233 aa, Gallus gallus
MSMNGGSHPRINTLGRMARADSGTDLRYEMSSHVVGGGGGGTHTHKTYYYQKTYGGDYASDGYGQNGTCTVTRRQNTIQELLQNCSDCLMRAELIVQPELKYGDGVQIRGNRDLEECFAQANDQMDILDGLIRELRQMNQPCEMYQKRLLQLQEQMRALYKAISVPRARRASSKGGGCYSSQSGSGWDEYTKRVTSECLNWMRQQKAEMELVKWGFDAASIEQQISDHRRTHNAIGDYRWHLDKVKTDLREKAAVHQLEEEYEGLLKYSFERMDQLRQFQNLIQATSREIMWINDCEEEELLYDWSDRNTDISRKQEAFSKRMSELELKEKELNKLKQESDQLVLNQHPASDKIEAYMDTLQTQWSWILQITKCIDVHLKENAAYFQFFEEAQATESYLKNLQDSIRKKFICDKSMSLQSLLEQIKELENERERILEYKRQVQSLVNKSKKIVQLKPRNPDYRSNKPIILKALCDYKQDLKTVRKGDECILKDNNERSKWLVTGPGGVDMLVPSVSLIIPPPNPLAVDLATKIEQYYEAILALWNQLYINMKSLVSWHYCMIDIEKIRAMTIAKLKTMRKEDYQKIITDLEIHYQEFLRNSQGSEMFGDEDKRKIQTQFTDAQKHYQTLIIQLPNQPRPPQTVIPTESCPVGTSNTIIVNERNREHDKQEAWLLMELQKLRRQIEASEIRMVQRAPLGVDQGALHDFSVRIQDLEGVQNDSQIMAETLNKHKDLLPNFRGCEKYVYLQSEINALFQKLENINGVSAGYLDSLNALRCLLQLILQTEDVIRVFEVRLSEEETVPLDLDKVEAYRACLKKMKSDLNMKKSLLNTLENELQKMIQIHSQSCQSYTLYDMDVGKFTDKVTQLIDRWQRAEKQIDNRSWDLERQIKQLKTYRDLYQALCKWICDAKRRQDSIESTKLCDSNTIMRYLHDQKNLHSEICGKRDKVEELLKHADQCSAAIKDYELQVASYSSGLETLLNIPIKKCVVQSPAVLILQEASEAQARYIELLTRSGDYYKFLSEMLKSMEDLKMKATKIELLEEELRLARDSNSETNNKHKFLEQNLQKYQMDISQLKAKLMSLEEMKRQAEMDGNSAKQNLDKCYAQIKDLNDRITRLTYETEDEKRKRKLLEDRYEQQKNDYDQLQKTRQNEKDSLGWQKLESEKVIKEKEYEIERLRVLLQDEGTRKREYENELAKVRNQFSEEMSNLKNKYETEINIKKTTIQQIAAQKDDDAKGLRAQVDRLSRENRDLKDEIVRLNDAILQTTDQRRRAEEDALQQKACSSEVSQQKHQLELELKQIIQLRGEDNSRYKQALEEAAATIQDKTKELERLKLQLQEEAKSRWELENELAKVRNSYDEEIISLKNKYETEINITKTTIHQVTMQKEEDTNNYRTQLDNAVRENRNLCEEIRRLKNTITQTTDNLRKIEENAQQQKAAGSELSQKKQQLEIELKQVIQRHSDESMRYKQSLDDASKTIKERNKEIERLRKLLDIQKHKLEEELCRQNKNVMEETARRKKLDEEVEGMRRSLREQSVKITNLTQQIEEVSIVKKRNEDDLRHQREVLDGHVREKQRYMEEIRKYTSDLETLRRQLVQEQEQLKQAHLRNEHLQKTSEEKSKNLNECKIEIERLQSLTENLTKEHLLLEEELRNVRLEYDDLKMVRSEVDEKNSAIAELKNQLQTSSKQTLELQGLINDLQKEREKLRQEIEKFQKQALEASNRIQESKNQYNHIMQERETLLIKMSALEQDKARLQRLEEELNRLKVNLESESRLKQRLENEKQQILNDLNQWKSQHSRTEESIRKIQCEREKSEREKNTLRSEIERLQMEIKRIEERYRCRLEETAVKNQSELESERLRLQREIEKLKQRPYGSHRSTQTEEDFCIDASKLLFNGLRKKITAMQLYECQLIDKLTLDKLLKGQRSVEEVAADIEPFLKGAGAIAGVSVLPRQKYSFVEAKRNQLLTAENAVLLLEAQAATGGVIDPHRNEVLTVDSAIARDLIDFDDREQIYTAEKAITGFKDPFSGKTVPLSEAIKKNLVDREIGMRLLEAQLAVGGIVDPVNSVFLPKDVALSRGLIDKDLYRILNNCQSTTKNFIDPSTKKAVTYMQLKEKCRIEPHTGLLLLPVQKRSMSFQGIRQPVSADALLEAGIIKESTRNDLERGAITVEEVSERIIDFLQGSSCIAGIYNEATKEKLGIYQAMKIGLVRPELSLGTKTQKLETSFLCFKQ

SEQ ID NO: 49 - DNA, 2235 bp, Homo sapiens
  CDS (1)..(2235)
atggaggtgatgaacctgatggagcagcctatcaaggtgactgagtggcagcagacatacacctacgactcgggtatccactcgggcgccaacacctgcgtgccctccgtcagcagcaagggcatcatggaggaggatgaggcctgcgggcgccagtacacgctcaagaaaaccaccacttacacccagggggtgccccccagccaaggtgacctggagtaccagatgtccacaacagccagggccaaacgggtgcgggaggccatgtgccctggtgtgtcaggcgaggacagctcgcttctgctggccacccaggtggaggggcaggccaccaacctgcagcgactggccgagccgtcccagctgctcaagtcggccattgtgcatctcatcaactaccaggacgatgccgagctggccactcgcgccctgcccgagctcaccaaactgctcaacgacgaggacccggtggtggtgaccaaggcggccatgattgtgaaccagctgtcgaagaaggaggcgtcgcggcgggccctgatgggctcgccccagctggtggccgctgtcgtgcgtaccatgcagaataccagcgacctggacacagcccgctgcaccaccagcatcctgcacaacctctcccaccaccgggaggggctgctcgccatcttcaagtcgggtggcatccctgctctggtccgcatgctcagctcccctgtggagtcggtcctgttctatgccatcaccacgctgcacaacctgctcctgtaccaggagggcgccaagatggccgtgcgcctggccgacgggctgcaaaagatggtgcccctgctcaacaagaacaaccccaagttcctggccatcaccaccgactgcctgcagctcctggcctacggcaaccaggagagcaagctgatcatcctggccaatggtgggccccaggccctcgtgcagatcatgcgtaactacagttatgaaaagctgctctggaccaccagtcgtgtgctcaaggtgctatccgtgtgtcccagcaataagcctgccattgtggaggctggtgggatgcaggccctgggcaagcacctgaccagcaacagcccccgcctggtgcagaactgcctgtggaccctgcgcaacctctcagatgtggccaccaagcaggagggcctggagagtgtgctgaagattctggtgaatcagctgagtgtggatgacgtcaacgtcctcacctgtgccacgggcacactctccaacctgacatgcaacaacagcaagaacaagacgctggtgacacagaacagcggtgtggaggctctcatccatgccatcctgcgtgctggtgacaaggacgacatcacggagcctgccgtctgcgctctgcgccacctcactagccgccaccctgaggccgagatggcccagaactctgtgcgtctcaactatggcatcccagccatcgtgaagctgctcaaccagcccaaccagtggccactggtcaaggcaaccatcggcttgatcaggaatctggccctgtgcccagccaaccatgccccgctgcaggaggcagcggtcatcccccgcctcgtccaactgctggtgaaggcccaccaggatgcccagcgccacgtagctgcaggcacacagcagccctacacggatggtgtgaggatggaggagattgtggagggctgcaccggagcactgcacatcctcgcccgggaccccatgaaccgcatggagatcttccggctcaacaccattcccctgtttgtgcagctcctgtactcgtcggtggagaacatccagcgcgtggctgccggggtgctgtgtgagctggcccaggacaaggaggcggccgacgccattgatgcagagggggcctcggccccactcatggagttgctgcactcccgcaacgagggcactgccacctacgctgctgccgtcctgttccgcatctccgaggacaagaacccagactaccggaagcgcgtgtccgtggagctcaccaactccctcttcaagcatgacccggctgcctgggaggctgcccagagcatgattcccatcaatgagccctatggagatgacatggatgccacctaccgccccatgtactccagcgatgtgccccttgacccgctggagatgcacatggacatggatggagactaccccatcgacacctacagcgacggcctcaggcccccgtaccccactgcagaccacatgctggcc

SEQ ID NO: 50 - protein, 745 aa, Homo sapiens
MEVMNLMEQPIKVTEWQQTYTYDSGIHSGANTCVPSVSSKGIMEEDEACGRQYTLKKTTTYTQGVPPSQGDLEYQMSTTARAKRVREAMCPGVSGEDSSLLLATQVEGQATNLQRLAEPSQLLKSAIVHLINYQDDAELATRALPELTKLLNDEDPVVVTKAAMIVNQLSKKEASRRALMGSPQLVAAVVRTMQNTSDLDTARCTTSILHNLSHHREGLLAIFKSGGIPALVRMLSSPVESVLFYAITTLHNLLLYQEGAKMAVRLADGLQKMVPLLNKNNPKFLAITTDCLQLLAYGNQESKLIILANGGPQALVQIMRNYSYEKLLWTTSRVLKVLSVCPSNKPAIVEAGGMQALGKHLTSNSPRLVQNCLWTLRNLSDVATKQEGLESVLKILVNQLSVDDVNVLTCATGTLSNLTCNNSKNKTLVTQNSGVEALIHAILRAGDKDDITEPAVCALRHLTSRHPEAEMAQNSVRLNYGIPAIVKLLNQPNQWPLVKATIGLIRNLALCPANHAPLQEAAVIPRLVQLLVKAHQDAQRHVAAGTQQPYTDGVRMEEIVEGCTGALHILARDPMNRMEIFRLNTIPLFVQLLYSSVENIQRVAAGVLCELAQDKEAADAIDAEGASAPLMELLHSRNEGTATYAAAVLFRISEDKNPDYRKRVSVELTNSLFKHDPAAWEAAQSMIPINEPYGDDMDATYRPMYSSDVPLDPLEMHMDMDGDYPIDTYSDGLRPPYPTADHMLA

SEQ ID NO: 51 - DNA, 3226 bp, Mus musculus
  CDS (113)..(2347)
ggagcagccgccgcccgagtgcgccgagctcagttcgctgcccgcgccggctccctcccggccagacccgaccccgattcggctcagcccggctccacgctcagcagccaccatggaggtgatgaaccttattgagcagcccatcaaggtgacagagtggcaacagacatacacctacgactcgggcatccactccggcgtcaatacctgtgtgccctctgtaagcagcaagggcatcatggatgaggatgatgcctgcggcagacagtacacactcaagaagactaccacctatacacaaggggtgccacagaaccaaggtgacctggaataccagatgtccacaacggccagagccaagcgggtgcgggaggccatgtgtccaggggtctcaggcgaggacagttctctactgctggccacccaggtggaggggcagacaaccaatctgcagcgcctggccgaaccatcccagttgctcaagtcggccatcgtccatctcatcaactaccaggatgatgcagagctggccacccgggctctgcctgagctcaccaagctgctcaacgatgaggacccggtagtggtgaccaaggcggctatgatcgtgaaccagctgtccaagaaggaggcatcccgccgggctctaatgggctcgccccagctggtggcggcggtggtgcggactatgcagaacaccagtgacctggatactgcccggtgtaccaccagcatcctgcacaacctctctcaccaccgagagggcttgctcgccatattcaagtctggaggcatccctgccctagtccgaatgctcagttcccccgtagaatctgtcctgttctacgccatcaccacactgcacaacctgctgctctatcaggagggcgccaagatggcggtgcgtctggcagacgggctgcagaagatggtgcccctactcaacaagaacaaccctaagttcctggccatcactactgactgcctgcagctcctggcctatggcaaccaggagagcaagctgatcatcctggccaatgggggaccccaagggcttgtgcagatcatgaggaactacagctacgagaagcttctgtggaccaccagccgtgtgctcaaggtgctctccgtgtgtcctagcaacaagcccgccatcgtggaggctggtgggatgcaggctctgggcaagcacttgacaagcaacagtccccgcctggtgcagaactgcctgtggactctgcgcaatctctcggatgtagccaccaagcaggagggcctggagagtgtgctgaagatcctggtcaaccaactgagtgtagatgacgtcaacgtcctcacctgtgccacgggcaccctctccaacctgacctgcaacaacagcaaaaacaagacgctggtgacacagaacagtggcgtggaggcgctcatccacgccatcctgagagccggagacaaagatgacatcacagagcccgctgtctgtgccctgcgccaccttaccagccgtcaccccgaggctgagatggcccagaactctgtgcgcctcaactatggaatcccggccattgtgaaactgctcaaccagccaaaccagtggccactggtcaaggcaactattggcctgatccggaacctggctctgtgcccagccaaccatgcccctctgcaggaggccgcggtcattccccgcctcgtccagctgttggtcaaggcccaccaggacgcccagcgccatgtggctgcaggcacccagcagccctacacggatggtgtgaggatggaggagatcgtggaaggctgcaccggagccctgcacatcctcgcccgggatcccatgaaccgcatggagatcttccggctcaacaccattcccctgtttgtccagctcctgtactcctctgtggagaacatccagcgtgtggctgcgggagtgctctgcgagctggcccaggacaaggaggctgccgacgccattgatgcggagggcgcctctgcccctctcatggagctactccattcccgcaatgagggcaccgcgacctacgctgctgctgtcctgttccgcatctctgaggacaagaacccagattaccgtaagcgagtgtctgtggagctcaccaattccctcttcaagcatgacccagctgcctgggaggctgcccagagtatgatcccgatcaacgaaccctatgcagacgacatggatgccacctaccgccccatgtactccagcgatgtgcctctggaccctctggacatgcacatggacctggatggagactaccccatggacacctacagtgacggcctgaggcctccctaccccactgcagaccacatgctggcctagccagctccacctcagcgctgtttctcacctggaaagctctcaagagcagactgtgggaggagacagaaaagtacctgagccccgggggccggcctggacttcctgctgaacacgcgtgctcccgtgctccagagagttcctccatagggattttgggatggtgtctgttcctgcttttctgtcctgggctggggatccaggctcagcactttctccccgtccccactatggctatggccactaaagctttagactcagcctgtgtccctgcacagcaattctctctgctgactccagctgcctggacccccacccccacccccacccaggccttcctttgttttttttcgggggccagttttctcacttgacctcctgggatatccaagacacaggttcaaggccccaacccctgacacccaaagcttcttttgaaaagttcagggaccttcttgggggtcggtggggagagcggagacattaagtgcccctgccaggacctgcccttcccttcaggatgctaagtttttgctttgaccctcccaaggggggagctcttggtgacgctccctccctctcacatcactccacactggcccatctgctctgcagaagcgttctggctcacccctctggtgtgtggtgaggggctttcttctccccctcctgtttgactcccaccacctcctgcacatgggtttgggggcgggggtgggggactgaaagggaagtcccctcagagagtcttattatcaacactttattttttggttattggcttttcttttctttttttgtttttgtatagaccaaagcaaagaaaataaaataacacagagatccaaaaaaaaaaaaaaaaaaaaaaaaaaaaaaaaa

SEQ ID NO: 52 - protein, 745 aa, Mus musculus
MEVMNLIEQPIKVTEWQQTYTYDSGIHSGVNTCVPSVSSKGIMDEDDACGRQYTLKKTTTYTQGVPQNQGDLEYQMSTTARAKRVREAMCPGVSGEDSSLLLATQVEGQTTNLQRLAEPSQLLKSAIVHLINYQDDAELATRALPELTKLLNDEDPVVVTKAAMIVNQLSKKEASRRALMGSPQLVAAVVRTMQNTSDLDTARCTTSILHNLSHHREGLLAIFKSGGIPALVRMLSSPVESVLFYAITTLHNLLLYQEGAKMAVRLADGLQKMVPLLNKNNPKFLAITTDCLQLLAYGNQESKLIILANGGPQGLVQIMRNYSYEKLLWTTSRVLKVLSVCPSNKPAIVEAGGMQALGKHLTSNSPRLVQNCLWTLRNLSDVATKQEGLESVLKILVNQLSVDDVNVLTCATGTLSNLTCNNSKNKTLVTQNSGVEALIHAILRAGDKDDITEPAVCALRHLTSRHPEAEMAQNSVRLNYGIPAIVKLLNQPNQWPLVKATIGLIRNLALCPANHAPLQEAAVIPRLVQLLVKAHQDAQRHVAAGTQQPYTDGVRMEEIVEGCTGALHILARDPMNRMEIFRLNTIPLFVQLLYSSVENIQRVAAGVLCELAQDKEAADAIDAEGASAPLMELLHSRNEGTATYAAAVLFRISEDKNPDYRKRVSVELTNSLFKHDPAAWEAAQSMIPINEPYADDMDATYRPMYSSDVPLDPLDMHMDLDGDYPMDTYSDGLRPPYPTADHMLA

SEQ ID NO: 53 - DNA, 2235 bp, Rattus norvegicus
  CDS (1)..(2235)
atggaggtgatgaaccttattgaacagcccatcaaggtgacggagtggcagcagacgtacacctatgactcgggcatccactccggtgtcaatacctgtgtgccctctgtcagcagcaagggcctcctcgatgaggatgacacctgcggcagacagtacacactcaagaaaactaccacctacacacaaggggtgccacagagccaaggcgacctggagtaccagatgtccaccacggccagagccaagcgggtgcgggaggccatgtgcccaggtgtctcaggcgaggacagttctctcctcctggccacccaggtggaggggcagacgaccaacctgcagcgactggccgaaccatcccagctactcaagtcggccattgtacatctcatcaactaccaggacgacgcagagctggccacccgggctctgcctgagctcaccaagctgctcaacgatgaggacccggtagtggtcaccaaggcggctatgatcgtgaaccagctgtccaagaaggaggcatcccgccgtgccctgatgggctcgccccagctggtggcggctgtggtgcggaccatgcagaacaccagtgacctggatactgcccgctgtaccaccagcatcctgcacaacctctcccaccaccgagaggggctgcttgctatcttcaagtctggaggcatccccgccctggtccgaatgctcagttcccccgtagagtctgtcctgttctacgccatcaccacactgcacaacctgctgctctaccaggagggcgccaagatggcggtgcgtctggcagacggactgcagaagatggtgcccctacttaacaagaacaaccccaaattcctggccatcaccaccgactgcctgcagctcctggcctatggcaaccaggagagcaagctgatcatcctggccaatgggggaccccagggtcttgtgcagatcatgaggaactacagctacgagaagcttctgtggaccaccagccgggtgctcaaggtgctctccgtgtgccccagcaacaagcctgccatcgtggaggctggtgggatgcaggctctaggcaagcacttgacaagcaacagcccccgcctggtgcagaactgcctgtggactctgcgcaatctctcggatgtggccaccaagcaggagggcctggagaacgtgctgaagatcctggtcaatcagctgagcgtggatgatgtcaacgtcctcacctgtgccacgggcaccctctccaacctgacctgcaacaacagcaaaaacaagacgctggtgacgcagaacagtggcgtggaggcgctcatccacgccatcctcagagccggagacaaggacgacatcacagagcccgccgtttgcgccctgcgccaccttaccagccgccaccctgaggctgagatggcccagaactctgtgcgcctcaactatggaatcccggccattgtgaaactgctcaaccagccgaaccagtggccactggtcaaggcaactatcggcctgatccggaacctggctctgtgccccgccaatcatgccccgctgcaggaggccgcggtcattccccgcctcgttcagctgctggtcaaggcccaccaggatgcccagcgacatgtagctgcgggcacccagcagccctacacggatggtgtgaggatggaggagatcgtggagggctgcaccggagccctgcacatcctcgcccgagatcccatgaaccgcatggagatcttccggctcaacaccattcccctgtttgtccagctcctgtattcctctgtggagaacatccagcgtgtggctgccggagtgctgtgcgagctggcccaggacaaggaggctgccgatgccatagacgcggagggcgcctctgcccctctcatggaactgctccactcccgcaatgaggggaccgcgacctacgctgctgctgtcctgttccgcatctccgaggacaagaacccagattaccgtaagcgagtgtctgtggaactcaccaactcgctcttcaagcatgacccagctgcctgggaggctgcccagagcatgatcccgatcaacgaaccctatgcagacgacatggatgcaacctaccgccccatgtactccagcgatgtgcctctggaccccctggatatgcacatggacatggatggcgactaccccatggacacctacagcgacggcctgagacctccctaccccgctgcagaccacatgctggcc

SEQ ID NO: 54 - protein, 745 aa, Rattus norvegicus
MEVMNLIEQPIKVTEWQQTYTYDSGIHSGVNTCVPSVSSKGLLDEDDTCGRQYTLKKTTTYTQGVPQSQGDLEYQMSTTARAKRVREAMCPGVSGEDSSLLLATQVEGQTTNLQRLAEPSQLLKSAIVHLINYQDDAELATRALPELTKLLNDEDPVVVTKAAMIVNQLSKKEASRRALMGSPQLVAAVVRTMQNTSDLDTARCTTSILHNLSHHREGLLAIFKSGGIPALVRMLSSPVESVLFYAITTLHNLLLYQEGAKMAVRLADGLQKMVPLLNKNNPKFLAITTDCLQLLAYGNQESKLIILANGGPQGLVQIMRNYSYEKLLWTTSRVLKVLSVCPSNKPAIVEAGGMQALGKHLTSNSPRLVQNCLWTLRNLSDVATKQEGLENVLKILVNQLSVDDVNVLTCATGTLSNLTCNNSKNKTLVTQNSGVEALIHAILRAGDKDDITEPAVCALRHLTSRHPEAEMAQNSVRLNYGIPAIVKLLNQPNQWPLVKATIGLIRNLALCPANHAPLQEAAVIPRLVQLLVKAHQDAQRHVAAGTQQPYTDGVRMEEIVEGCTGALHILARDPMNRMEIFRLNTIPLFVQLLYSSVENIQRVAAGVLCELAQDKEAADAIDAEGASAPLMELLHSRNEGTATYAAAVLFRISEDKNPDYRKRVSVELTNSLFKHDPAAWEAAQSMIPINEPYADDMDATYRPMYSSDVPLDPLDMHMDMDGDYPMDTYSDGLRPPYPAADHMLA

SEQ ID NO: 55 - DNA, 2187 bp, Danio rerio
  CDS (1)..(2187)
atggaaatgcacatgggagaggctccaggttcggtgaaggtcacagagtggcagcagtcgtactacggcacagattcaggcatccattcaggagccactactgttcgctcagatgatgatggaacagagtacagctctaagaaattcacctacaccaccacattcacagagaaccctgcagaggtggagtctcagttaaacatgactcgtgctcagcgtgtgagggcggccatgtttcctgagactgtgatggagggatcggtcattcattctacacagatcgatccatcccagcagaccaatgtacaaaagctggccgaaccatctcagcagctcaaagctgccatcgttcacctcatcaactaccaggacgacgctgaactcgccacacgcgccatcccagagctcaccaaactcctcaacgatgaagaccagttggttgtgaacaaagccgctatgatcgtgaaccaactgacccgcaaggaggcatcccgcagggctcttatgcagtccccgcagatggtggccgctgtagtgagagccatgcagaacacgaccgacatggagacgacccgcgccacagccagcatcctgcacaacctctcgcaccagcgtgaaggactgctcgccatcttcaaatcaggcggcattccagctctggtgcgcatgctgagctctccgatggactctgtacttttctacgccatcaccaccctgcacaacctgcttttgcaccaagagggagccaagatggcggtgcgtctggctgatggtctccagaggatggttcccctgctgaagaaaagcaaccccaaattcctggccatcaccacagactgcttgcagctgctgtcctatggcaaccaggagagcaagctgattatcctggctaatggtggtcctgagggtcttgtcaacatcatgaggacttacaactatgagaagctgctgtggaccaccagtcgtgtgctgaaagtgctctctgtctgtccaagcaacaagcctgccatcgtagatgctggtggaatgcaagctcttggtaaacatctgtccggctcaagtcagcgtctgatgcaaaactgcttgtggactttgagaaacttgtcagatgctgcaaccaaacaggacggtatggagaatcttcttcaagtcttggtcggtctgctgtctgctgatgacatcaacatgctgacatgtgccacaggcgtcctgtccaacctcacctgcaacaacacacgcaacaaaacgcaggtgacccagagtaacggcgtggaggctctcattcacaccatcctgagggccagttcaaaacaggacgtgatcgagccagccgtctgcgccctgcgccacctcaccagccgacacccagaggctgagactgcacagaacgccgtacgaatgcattacggcatccctgctattgtcaaactgctcaatcaaccctaccactggccagttgtcaaggctgtggttggtctgatccgtaacctggccctgtgtccagccaatcaggctcctttgagggacgctgacgccattcccaaactggtcactttgctttcaaaagctcatcaggatgcacagaaacccggttcatctgctcaacgatcataccaggatggggtaagaatggaggagattgttgagggctgcactggtgctcttcatatcatggccagagatcctatgaaccgaggcaccattgccagcatggacaccattcctctgtttgttcagctgttgtattctccactggataacgtcaagcgtgtggcagctggtgttctgtgtgaactggctcttgataaacagtcggctgagatcatcgatgcggaaggagccagtgctcctctcatggagctccttcactccagcaacgaagggatcgccacctatgctgctgctgttctctacagaactgctgaggacaaaaacccagactataagaaaagagtttcagtagaactcacacactcactcttcaaacacgaccctgaggcttgggaaatggcacacaacactgtgatggatcccgtccttggcgatgaagagcttgatggctacggtcctgcaggatacggtggatatgctgatggcatgcatatggatcctctagatccagaaatgcaagacgattttaggagcggcatgccctacaactccatggccagagtctaccatgattac

SEQ ID NO: 56 - protein, 729 aa, Danio rerio
MEMHMGEAPGSVKVTEWQQSYYGTDSGIHSGATTVRSDDDGTEYSSKKFTYTTTFTENPAEVESQLNMTRAQRVRAAMFPETVMEGSVIHSTQIDPSQQTNVQKLAEPSQQLKAAIVHLINYQDDAELATRAIPELTKLLNDEDQLVVNKAAMIVNQLTRKEASRRALMQSPQMVAAVVRAMQNTTDMETTRATASILHNLSHQREGLLAIFKSGGIPALVRMLSSPMDSVLFYAITTLHNLLLHQEGAKMAVRLADGLQRMVPLLKKSNPKFLAITTDCLQLLSYGNQESKLIILANGGPEGLVNIMRTYNYEKLLWTTSRVLKVLSVCPSNKPAIVDAGGMQALGKHLSGSSQRLMQNCLWTLRNLSDAATKQDGMENLLQVLVGLLSADDINMLTCATGVLSNLTCNNTRNKTQVTQSNGVEALIHTILRASSKQDVIEPAVCALRHLTSRHPEAETAQNAVRMHYGIPAIVKLLNQPYHWPVVKAVVGLIRNLALCPANQAPLRDADAIPKLVTLLSKAHQDAQKPGSSAQRSYQDGVRMEEIVEGCTGALHIMARDPMNRGTIASMDTIPLFVQLLYSPLDNVKRVAAGVLCELALDKQSAEIIDAEGASAPLMELLHSSNEGIATYAAAVLYRTAEDKNPDYKKRVSVELTHSLFKHDPEAWEMAHNTVMDPVLGDEELDGYGPAGYGGYADGMHMDPLDPEMQDDFRSGMPYNSMARVYHDY

SEQ ID NO: 57 - DNA, 2211 bp, Xenopus tropicalis
  CDS (1)..(2211)
atggatttggtggatgtagtggaagtgccaataaaagtcacagagtggcagaaaacctacacttacgactcgggcatcaattctggaataaacacagcgtctccatcgttaaacgggaaaatggtcatcgaggacgacagccatgcctaccccggcagttacactgttaaaaccacgacgtacacacagcagcagaccccagacatggacgcccagataaacatgactcgagcccagcgcgtccgagcagcaatgtacccagagacggtggaagatcactcgtaccttctgactacccagatagaagggcagcaaaccaacgtgcagaaactggcggaaccctcccaaatgttgaaatctgctatcatccaccttatcaactaccaggatgatgctgagcttgccacccgcgccattccggaactgacaaagctacttaatgatgaggatccgatggtggtgaacaaggcttccatgattgtaaaccagctgtccaagaaagaggcatcccgcaaagccctgatgcagtccccgcagattgttgccgctgtagttcgcaccatgcagcacacaagtgacatggacaccgctcgctgtaccaccagcatcctgcacaacctgtcccatcaccgcgaggggcttctgtctatcttcaaatccggcggcatccctgcacttgtgcgcatgctcagttctccagtagaatccgtgttattctatgccatcaccaccttgcacaacctgctgctctaccaggaaggggcaaagatggcagtgcgtctggcagatggtctccagaagatggtgcctttgcttaataagaataaccccaaattcttggccatcactacagactgccttcagctcttggcctatggaaatcaggagagcaagctaattatattggccaatggaggacctcaagggttggttcagatcatgaggaactacaattacgagaagcttctgtggaccacaagccgggtgctaaaagtattgtctgtgtgtcccagcaataaaccagccattgtggaagccggtggaatgcaagcactggggaaacatctgaccagcaacagcccaagacttgtacagaactgcctgtggacattaaggaatctctctgatgtggccactaaacaggagggcctggataacgttctaaagatcctggtgaaccagctgagttctgatgatgtaaacgtcctcacctgtgccactggcacattgtccaacctcacctgcaacaacggtcgcaacaagactctcgtgacgcagagcaacggggttgagtctctgattcacaccatccttcgtgcgagtgacaaggatgacattgcagagcctgctgtctgtgccctgcgtcacctgaccagtcgccaccaagacgcagaggtggctcagaattcagtgcgactgcactacggcatccctgccattgtgaaacttctcaacccaccataccagtggccactggtcaaggcaaccatcggcttgatccggaacctggccctttgtccagccaatcatgctcccttatacgatgcaggtgtcattcccaggctagtccagctgctggttaaagctcaccaagatgcacagaggcatgcagcttccggggcacagcaaccctacacggatggagtgaagatggaagagattgtggaaggttgcactggggctctgcatattcttgccagggatcctgtgaaccgtatggacatctacaagctaaacaccatcccgctgtttgtacagctcctgtattcccctgtggagaacattcagagagtggccgcgggcgtgctgtgtgagttggctcaggataaagaagcggcagacaccattgatgcagagggagcctcagccccactcatggaattgctgcactcccgcaatgaaggcatagccacatatgctgctgctgttctattccgcatatccgaggacaaaaacgcagattataggaagcgcgtgtccgtggagctcactaatgccatcttccgacaggatcctgccgcctgggaagcagcgcagagcatgattcctcttaatgatccttatccagatgaaatggaaaattatcgagctatgtaccctgaagatattccattagaaccaatgggaggagatatggatgtggagtatgcaatggatggctacagtgaccacccagtcagggggggctactctgataaccacatgatggca

SEQ ID NO: 58 - protein, 737 aa, Xenopus tropicalis
MDLVDVVEVPIKVTEWQKTYTYDSGINSGINTASPSLNGKMVIEDDSHAYPGSYTVKTTTYTQQQTPDMDAQINMTRAQRVRAAMYPETVEDHSYLLTTQIEGQQTNVQKLAEPSQMLKSAIIHLINYQDDAELATRAIPELTKLLNDEDPMVVNKASMIVNQLSKKEASRKALMQSPQIVAAVVRTMQHTSDMDTARCTTSILHNLSHHREGLLSIFKSGGIPALVRMLSSPVESVLFYAITTLHNLLLYQEGAKMAVRLADGLQKMVPLLNKNNPKFLAITTDCLQLLAYGNQESKLIILANGGPQGLVQIMRNYNYEKLLWTTSRVLKVLSVCPSNKPAIVEAGGMQALGKHLTSNSPRLVQNCLWTLRNLSDVATKQEGLDNVLKILVNQLSSDDVNVLTCATGTLSNLTCNNGRNKTLVTQSNGVESLIHTILRASDKDDIAEPAVCALRHLTSRHQDAEVAQNSVRLHYGIPAIVKLLNPPYQWPLVKATIGLIRNLALCPANHAPLYDAGVIPRLVQLLVKAHQDAQRHAASGAQQPYTDGVKMEEIVEGCTGALHILARDPVNRMDIYKLNTIPLFVQLLYSPVENIQRVAAGVLCELAQDKEAADTIDAEGASAPLMELLHSRNEGIATYAAAVLFRISEDKNADYRKRVSVELTNAIFRQDPAAWEAAQSMIPLNDPYPDEMENYRAMYPEDIPLEPMGGDMDVEYAMDGYSDHPVRGGYSDNHMMA

SEQ ID NO: 59 - DNA, 2232 bp, Canis familiaris
  CDS (1)..(2232)
atggaagtgatgaacctgattgaacaacccatcaaagtgactgagtggcaacagacatacacctatgactctggcattcactcgggtgccaacacctgtgtgccctcggtcagcagcaagggcatcatggaagaggatgaggcctgcgggcgtcagtacacgctcaagaagaccaccacctatacccaggtgccccagagccaaggtgacctggagtaccaaatgtccacgacagccagagccaagcgggtacgggaggccatgtgtcctggcgtgacaggcgaagacagctcgctgctactggccacccaggtggaagggcagaccaccaacctgcagcggctggccgagccgtcccagctgctcaagtcagccatcgtacatctcatcaactaccaggacgacgccgagctggccacccgggccctgcctgaactcaccaaactgctcaacgacgaggacccggtggtggtgaccaaggcagccatgatcgtgaaccagctgtccaagaaagaggcgtcacggcgggcgctgatgggctcgccccagctggtggcagccgtggtgcgtactatgcagaacaccagtgacctggacacagcccgctgcaccaccagcatcctgcacaacctctcccaccaccgcgaggggctgcttgccatcttcaagtcgggcggcatccctgccctggtccgcatgctcagctccccggtggagtcagtcctgttttacgccatcaccacgctgcacaacctgctgctgtaccaggagggcgccaagatggcggtgcgcctggcagatgggctgcagaagatggtgcccctgctcaacaaaaacaaccccaagttcctggccatcaccaccgactgcctgcagctcctggcttatggcaaccaggagagcaagctcatcatcttggccaatggaggaccccaggcccttgtgcagatcatgcgcaactacagctatgagaagctgctctggaccaccagccgtgtgctcaaggtgctgtctgtgtgtcccagcaataagcctgccatcgtggaggctggtgggatgcaggccttgggcaaacacctgacaagcaacagcccccgccttgtacagaactgtctctggaccttgcgcaacctctcggatgtggccaccaaacaggagggcctggagagcgtcctgaagatcctggtgaaccagctgagtgtggacgacgtcaatgtcctcacctgtgccacgggcactctgtccaacctgacgtgcaacaacagcaagaataagacgctggtgacccagaacagcggcgtggaggctctcatccatgccatcctgcgggctggcgacaaggatgacatcacggagcccgccgtctgcgccctgcgccacctcaccagccgccacccggaggccgagatggcccagaactccgtgcgcctcaactacggcatcccggccattgtcaagcttctcaaccagcccaaccagtggccgctggtcaaggcaaccatcggcctgatcaggaatctggctctgtgcccagcaaaccatgccccactgcaggaggcagcagttattccccgccttgtccagttgctggtcaaggctcaccaggatgcccagcgtcatgtggctgcaggcacacagcagccctacacggacggtgtgaggatggaggagattgtggagggctgcactggagccctgcacatcctcgcccgggatcccatgaaccgcatggagatcttccgactcaacactatacccctgtttgtacagctcctgtactcgtcagtggagaacatccagcgcgtggctgccggggtgctgtgtgagctggcccaggacaaggaggcagctgatgcaattgatgctgagggggcctcagctccactcatggagctactgcactcccgcaatgagggcaccgccacctacgctgcggctgtcctgttccgcatctccgaggacaagaacccagattaccgtaaacgcgtatctgtggagctcaccaactccctcttcaagcatgacccagctgcatgggaggctgcccagagcatgatccccatcaatgagccctacgcagatgacatggacgccacctaccgccccatgtactcgagtgatgtgcccctggaccccctggacatgcacatggacatggacgcggactatcccatcgacacttacagcgacggcctgaggcccccctaccccacggcggaccatatgctggcc

SEQ ID NO: 60 - protein, 744 aa, Canis familiaris
MEVMNLIEQPIKVTEWQQTYTYDSGIHSGANTCVPSVSSKGIMEEDEACGRQYTLKKTTTYTQVPQSQGDLEYQMSTTARAKRVREAMCPGVTGEDSSLLLATQVEGQTTNLQRLAEPSQLLKSAIVHLINYQDDAELATRALPELTKLLNDEDPVVVTKAAMIVNQLSKKEASRRALMGSPQLVAAVVRTMQNTSDLDTARCTTSILHNLSHHREGLLAIFKSGGIPALVRMLSSPVESVLFYAITTLHNLLLYQEGAKMAVRLADGLQKMVPLLNKNNPKFLAITTDCLQLLAYGNQESKLIILANGGPQALVQIMRNYSYEKLLWTTSRVLKVLSVCPSNKPAIVEAGGMQALGKHLTSNSPRLVQNCLWTLRNLSDVATKQEGLESVLKILVNQLSVDDVNVLTCATGTLSNLTCNNSKNKTLVTQNSGVEALIHAILRAGDKDDITEPAVCALRHLTSRHPEAEMAQNSVRLNYGIPAIVKLLNQPNQWPLVKATIGLIRNLALCPANHAPLQEAAVIPRLVQLLVKAHQDAQRHVAAGTQQPYTDGVRMEEIVEGCTGALHILARDPMNRMEIFRLNTIPLFVQLLYSSVENIQRVAAGVLCELAQDKEAADAIDAEGASAPLMELLHSRNEGTATYAAAVLFRISEDKNPDYRKRVSVELTNSLFKHDPAAWEAAQSMIPINEPYADDMDATYRPMYSSDVPLDPLDMHMDMDADYPIDTYSDGLRPPYPTADHMLA

SEQ ID NO: 61 - DNA, 2214 bp, Xenopus laevis
  CDS (1)..(2214)
atggatttgggagacgtagtggaaatgccaatgaaggtcacagagtggcagaaaacctacacttacgactcgggcatcaactctggaataaacacgtctgttccatcattgaatgggaaaatggtcattgaggacgacagtctggcctatcccaacagttacaccactgtcaaaaccacaacatacacacagcagcagaatccagacatggaatcccacttaaacatgactcgggcccagcgtgtccgagcagcgatgtatccggagacggtggaagaccactcgtatctgttcagcacacagatagaagggcagcaaacaaatgtgcagaaactggcagaaccctctcaaatgttaaaatctgccatcatgcaccttatcaactaccaggacgatgctgagctggccacccgtgccattcctgaactgaccaagcttcttaatgatgaggatccgatggtggtgaacaaggcttccatgattgtaaaccagctgtccaagaaggaagcgtcacgcaaagccctcatgcagtctccccagattgtggcagccatagttcgcaccatgcaacacacaagtgacatggacactgctcgctgtacaaccagcattctgcacaacctctcccaccaccgcgaggggcttctgtctatcttcaagtccggtggcatccctgcactggtgcgcatgctcagttctccagtagaatctgtgctattctatgccatcaccaccttgcacaacctgctcctctaccaggaaggggcaaagatggcagtgcgtctggcagatggtctccaaaagatggtgcccttgcttaataagaataaccccaagttcttggccatcaccacagactgtctgcaacttctggcctacggaaatcaggagagcaagctaattatattgggcaatggaggcccccaaggtttggttcagatcatgaggaactacaattacgagaagcttctgtggaccactagccgggtgctaaaagtattgtctgtatgtcccagcaataagccagccattgtggaagctggtggaatgcaagctctggggaaacatctgaccagcaacagcccaagacttgtacagaactgcctgtggacattaagaaatctctctgatgtggccacaaaacaggagggcctggataacgttctgaagatcctggtgaaccagctgagctccgatgatgtcaacgtcctcacctgtgccactggcactttgtccaacttaacctgcaacaacggtcgcaacaagactctggtgacccagagcaatggggtggaatctctcattcacaccatcctccgtgcaagtgacaaggacgacattgcagagcctgcggtctgtgccatgcgccatcttaccagtcgccaccaggatgctgaggtagcgcagaactctgtgcgacttcactacggcatccccgccattgtgaaacttctcaacccaccataccagtggccactggtcaaggcaactatcggcttgatccgaaatctggccctgtgtccagccaatcacgctcctttgtatgatgcgggtgttatcccccggctagtccagctgctggttaaatctcaccaagatgcacagaggcatgctgcttctgggacacagcaaccctatacggatggagtgaagatggaagagattgtggaaggctgcactggggctctgcatattcttgccagggatcctgtgaatcgtatggacatctacaagctgaacaccatcccactgtttgtgcagctcctgtattcccccgtggagaacattcagagagtgtcaagcggcgtgctgtgtgagttggctcaggataaagaagcggcagacaccattgatgcagagggagcttcggccccacttatggagttgctgcactcccgcaatgaaggcatagccacatatgctgctgctgttcttttccgcatatccgaggacaaaaacgctgattataggaaacgtgtgtccgtagagctcacaaatgccatcttccgacaggaccctgccgcatgggaagcagcgcagagcatgattcctctcaatgacccttattcagatgaaatggaaaattacagagcgatgtaccctgaagatatcccattagaaccaatggggggagacatggacgtggagtacgcaatggatggctacagcgaccacccaggcaggggccactatgctgataatcacatgatggca

SEQ ID NO: 62 - protein, 738 aa, Xenopus laevis
MDLGDVVEMPMKVTEWQKTYTYDSGINSGINTSVPSLNGKMVIEDDSLAYPNSYTTVKTTTYTQQQNPDMESHLNMTRAQRVRAAMYPETVEDHSYLFSTQIEGQQTNVQKLAEPSQMLKSAIMHLINYQDDAELATRAIPELTKLLNDEDPMVVNKASMIVNQLSKKEASRKALMQSPQIVAAIVRTMQHTSDMDTARCTTSILHNLSHHREGLLSIFKSGGIPALVRMLSSPVESVLFYAITTLHNLLLYQEGAKMAVRLADGLQKMVPLLNKNNPKFLAITTDCLQLLAYGNQESKLIILGNGGPQGLVQIMRNYNYEKLLWTTSRVLKVLSVCPSNKPAIVEAGGMQALGKHLTSNSPRLVQNCLWTLRNLSDVATKQEGLDNVLKILVNQLSSDDVNVLTCATGTLSNLTCNNGRNKTLVTQSNGVESLIHTILRASDKDDIAEPAVCAMRHLTSRHQDAEVAQNSVRLHYGIPAIVKLLNPPYQWPLVKATIGLIRNLALCPANHAPLYDAGVIPRLVQLLVKSHQDAQRHAASGTQQPYTDGVKMEEIVEGCTGALHILARDPVNRMDIYKLNTIPLFVQLLYSPVENIQRVSSGVLCELAQDKEAADTIDAEGASAPLMELLHSRNEGIATYAAAVLFRISEDKNADYRKRVSVELTNAIFRQDPAAWEAAQSMIPLNDPYSDEMENYRAMYPEDIPLEPMGGDMDVEYAMDGYSDHPGRGHYADNHMMA

SEQ ID NO: 63 - DNA, 2235 bp, Bos taurus
  CDS (1)..(2235)
atggaggtgatgaacctgatcgaacagcccatcaaggtgaccgagtggcagcagacatatacctacgactctggcatccactcgggggccaacacctgtgtgccctcgctcagcagcaagggcctcatagaggaggatgaggcctgcgggcgccagtacacgctcaagaagaccaccacctacacccagtcggtgcccccgggccaaggtgacctggagtaccagatgtccacaaccgccagagccaagcgggtgcgggaggccatgtgtcccggtgtgacaggagaggacagctcgctgctgctcaccacccaggtggaggggcagaccaccaacctgcagcggctggctgagccatcccaactcctcaagtcggccatcgtacatctcatcaactaccaggatgatgctgagctggccacccgggccctgcctgagctcaccaagctgctcaatgatgaggacccggtggtggtgaccaaggcggccatgatcgtgaaccagctgtcgaagaaggaggcgtctcggcgggcgctgatgggctcgccccagctggtggcggctgtcgtgcgcaccatgcagaacaccagtgacctggacacggcccgttgcaccaccagcatcctgcacaacctctcccaccaccgcgaggggctgcttgccatcttcaagtcgggcggcatccctgccctggtccgcatgctcagctcccctgtagagtcggtcttgttctatgccatcaccacgctgcacaacctgctgctctaccaggagggtgccaagatggcagtgcgcctggcagacgggctgcagaagatggtgcccctgctcaacaagaacaaccccaagttcctggccatcaccaccgactgcctgcagctcctggcctatggcaaccaggagagcaagctcatcatcctggccaatggaggaccccaggccctcgtccagatcatgcgcaactacagttatgagaagctgctctggaccaccagccgcgtgctcaaagtgctgtccgtgtgtcccagcaacaagcctgccattgtggaggctggtgggatgcaggccctgggcaagcacctgacgagcaatagcccccgccttgtgcagaactgcctgtggaccctgcgcaacctctctgatgtggccaccaagcaggagggcctggagagcgtgctgaagattctggtgaaccagctgagcgtggacgatgtcaatgtcctcacctgtgccacaggcactctgtccaacctgacatgcaacaacagcaagaacaagacgctggtgacacagaacagtggtgtggaggcgctcatccacgccatcctgcgcgcgggcgacaaggatgacatcacggagcccgctgtctgcgccctgcgccacctcaccagccgccaccccgaggccgagatggcccagaactccgtgcgtctcaactatggcatcccagccatcgtcaagctgctcaaccagcccaaccagtggccactggtcaaggcaaccattggcctgatcaggaatctggccctgtgcccagccaaccatgccccactgcaggaggcagcggtcattccccgccttgtccaactgctggtcaaggcccaccaggatgcccagcgccatgtggctgctggcacacagcagccctacacggatggtgtgaggatggaggagattgtggaaggctgcactggagccctgcacatccttgcccgggatcccatgaaccgcatggagatcttccgactcaacaccatccccctgtttgtgcagctcctctactcctcggtggagaacatccagcgcgtggccgccggggtgctgtgcgagctggcccaggacaaggaggcggccgacgccattgatgcggagggcgcgtcggccccactcatggagctgctgcactcgcgcaatgagggcaccgccacctacgccgctgccgtcttgttccgcatctccgaggacaagaacccagattaccgcaaacgggtgtctgtggagctcactaactccctcttcaagcacgaccctgccgcctgggaggctgcccagagcatgatccccatgaatgaaccctatgctgatgacatggacgccacctaccgccccatgtactcgagcgacgtgcccatggacccactggagatgcacatggacatggatggagactatcccatcgacacctacagtgacggcctcaggcccccctacgcaactgcagaccacatgctggcc

SEQ ID NO: 64 - protein, 745 aa, Bos taurus
MEVMNLIEQPIKVTEWQQTYTYDSGIHSGANTCVPSLSSKGLIEEDEACGRQYTLKKTTTYTQSVPPGQGDLEYQMSTTARAKRVREAMCPGVTGEDSSLLLTTQVEGQTTNLQRLAEPSQLLKSAIVHLINYQDDAELATRALPELTKLLNDEDPVVVTKAAMIVNQLSKKEASRRALMGSPQLVAAVVRTMQNTSDLDTARCTTSILHNLSHHREGLLAIFKSGGIPALVRMLSSPVESVLFYAITTLHNLLLYQEGAKMAVRLADGLQKMVPLLNKNNPKFLAITTDCLQLLAYGNQESKLIILANGGPQALVQIMRNYSYEKLLWTTSRVLKVLSVCPSNKPAIVEAGGMQALGKHLTSNSPRLVQNCLWTLRNLSDVATKQEGLESVLKILVNQLSVDDVNVLTCATGTLSNLTCNNSKNKTLVTQNSGVEALIHAILRAGDKDDITEPAVCALRHLTSRHPEAEMAQNSVRLNYGIPAIVKLLNQPNQWPLVKATIGLIRNLALCPANHAPLQEAAVIPRLVQLLVKAHQDAQRHVAAGTQQPYTDGVRMEEIVEGCTGALHILARDPMNRMEIFRLNTIPLFVQLLYSSVENIQRVAAGVLCELAQDKEAADAIDAEGASAPLMELLHSRNEGTATYAAAVLFRISEDKNPDYRKRVSVELTNSLFKHDPAAWEAAQSMIPMNEPYADDMDATYRPMYSSDVPMDPLEMHMDMDGDYPIDTYSDGLRPPYATADHMLA

SEQ ID NO: 65 - DNA, 2235 bp, Sus scrofa
  CDS (1)..(2235)
atggaggtgatgaacctgatcgaacagcccatcaaggtgaccgagtggcagcagacatacacctatgactcgggcatccactcgggggccaacacctgcgtgccctcggtcagcagcaaaggcctcatggaggaggacgaggcctgcgggcgccagtacacgctcaaaaagaccaccacctacacccaggcggtgccccaaagccaaggtgacctggagtaccagatgtccacgacggccagagccaagcgggtgcgggaggccatgtgtcctggtgtgacgggagaggacagctcgctgctgctggccacccaggtggaggggcagaccaccaacctgcagcggctggccgagccatcccagctcctcaagtcggccatcgtgcatctcatcaactaccaggacgacgctgagctggctacccgggccctgcccgagctcaccaaactgctcaacgacgaggacccggtggtggtgaccaaggcggccatgatcgtgaaccagctgtcgaagaaggaggcgtctcggcgggcgctgatgggctcgccccagctggtggcggccgtcgtgcgcaccatgcagaacaccagcgacctggacacggcccgctgcaccaccagcatcctgcacaacctctcccaccaccgcgaggggctgcttgccatcttcaagtccggcggcatccctgccctggtccgcatgctcagctcccccgtggagtcggtcctgttctacgccatcaccacgctgcacaacctgctgctctaccaggagggcgccaagatggcagtgcgcctggccgacgggctgcagaagatggtgcccctgctgaacaagaacaaccccaagttcctggccatcaccaccgactgcctgcagctcctggcctatggcaaccaggagagcaagctcatcatcctggccaatggaggaccccaggccctcgtgcagatcatgcgcaactatagttatgagaagctgctctggaccaccagccgcgtgcttaaggtgctgtctgtgtgtcccagcaataagcctgccattgtggaggccggtgggatgcaggccctgggcaaacacctgacaagcaacagccctcgcctcgtgcagaactgcctctggaccctgcgtaacctctcggacgtggccaccaagcaggagggcctggagagtgtgctgaagattctggtgaaccagctgagcgtggacgatgtcaacgtcctcacctgtgccacgggcactctgtccaacctgacctgcaacaacagcaagaacaagacgctggtgacgcagaacagcggcgtggaggcgctcatccacgccatcctgcgcgcgggcgacaaggatgacatcacggagcccgccgtctgcgccctgcgccacctcaccagccgccaccccgaggctgagatggcccagaactccgtgcgcctcaactacggcatcccggccatcgtcaagctgctcaatcagcccaaccagtggccactggtcaaggcaaccatcggcctgatcaggaatctggccctgtgcccagccaaccacgccccactgcaggaggcatctgtcatcccccgcctcgtccagctgctggtcaaggcccatcaggatgcccagcgccatgtggctgcaggcacacagcagccctacacggatggcgtgaggatggaggagattgtggagggctgcaccggagccctgcacatcctcgcccgggatcccatgaaccgcatggagatcttccgactcaacaccatccccctgtttgtgcagctcctgtactcttccgtggagaacatccagcgtgtggccgcaggggtgctgtgcgagttggcccaggacaaggaggcggccgacgctattgatgccgagggggcctcgtcccccctcatggagctcctgcactcccgcaatgagggcactgccacctatgctgctgctgtcttgttccgcatctctgaggacaagaacccagattaccgtaagcgtgtgtctgtggaactcaccaactccctcttcaagcacgaccctgcagcctgggaggctgcccagagcatgatccccatcaatgaaccctatgccgatgacatggatgccacctaccgccccatgtactcaagtgatgtgcccctggaccccctggagatgcacatggacatggacggggactatcccatggacacctacagcgacggcctcaggcccccctaccccgctgcagaccacatgctggcc

SEQ ID NO: 66 - protein, 745 aa, Sus scrofa
MEVMNLIEQPIKVTEWQQTYTYDSGIHSGANTCVPSVSSKGLMEEDEACGRQYTLKKTTTYTQAVPQSQGDLEYQMSTTARAKRVREAMCPGVTGEDSSLLLATQVEGQTTNLQRLAEPSQLLKSAIVHLINYQDDAELATRALPELTKLLNDEDPVVVTKAAMIVNQLSKKEASRRALMGSPQLVAAVVRTMQNTSDLDTARCTTSILHNLSHHREGLLAIFKSGGIPALVRMLSSPVESVLFYAITTLHNLLLYQEGAKMAVRLADGLQKMVPLLNKNNPKFLAITTDCLQLLAYGNQESKLIILANGGPQALVQIMRNYSYEKLLWTTSRVLKVLSVCPSNKPAIVEAGGMQALGKHLTSNSPRLVQNCLWTLRNLSDVATKQEGLESVLKILVNQLSVDDVNVLTCATGTLSNLTCNNSKNKTLVTQNSGVEALIHAILRAGDKDDITEPAVCALRHLTSRHPEAEMAQNSVRLNYGIPAIVKLLNQPNQWPLVKATIGLIRNLALCPANHAPLQEASVIPRLVQLLVKAHQDAQRHVAAGTQQPYTDGVRMEEIVEGCTGALHILARDPMNRMEIFRLNTIPLFVQLLYSSVENIQRVAAGVLCELAQDKEAADAIDAEGASSPLMELLHSRNEGTATYAAAVLFRISEDKNPDYRKRVSVELTNSLFKHDPAAWEAAQSMIPINEPYADDMDATYRPMYSSDVPLDPLEMHMDMDGDYPMDTYSDGLRPPYPAADHMLA

SEQ ID NO: 67 - DNA, 2187 bp, Danio rerio
  CDS (1)..(2187)
atggaaatgcacatgggagaggctccaggttcggtgaaggtcacagagtggcagcagtcgtactacggcacagattcaggcatccattcaggagccactactgttcgctcagatgatgatggaacagagtacagctctaagaaattcacctacaccaccacattcacagagaaccctgcagaggtggagtctcagttaaatatgactcgtgctcagcgtgtgagggcggccatgtttcctgagactgtgatggagggatcggtcattcattctacacagatcgatccatcccagcagaccaatgtacagaagctggccgaaccatctcagcagctcaaagctgccatcgttcacctcatcaactaccaggacgacgctgaactcgccacacgcgccatcccagagctcaccaaactcctcaacgatgaagaccagttggttgtgaacaaagccgctatgatcgtgaaccaactgacccgcaaggaggcatcccgccgggctcttatgcagtccccgcagatggtggccgctgtagtgagagccatgcagaacacgaccgacatggagacgacccgcgccacagccagcatcctgcacaacctctcgcaccagcgtgaaggactgctcgccatcttcaaatcaggcggcattccagctctggtgcgcatgctgagctctccgatggactctgtacttttctacgccatcaccaccctgcacaacctgcttttgcaccaagagggagccaagatggcggtgcgtctggctgatggtctccagaggatggttcccctgctgaagaaaagcaaccccaaattcctggccatcaccacagactgcttgcagctgctgtcctatggcaaccaggagagcaagctgattatcctggctaatggtggtcctgagggtcttgtcaacatcatgaggacttacaactatgagaagctgctgtggaccaccagtcgtgtgctgaaagtgctctctgtctgtccaagcaacaagcctgccatcgtagatgctggtggaatgcaagctcttggtaaacatctgtccggctcaagtcagcgtctgatgcaaaactgcttgtggactttgagaaacttgtcagatgctgcaaccaaacaggacggtatggagaatcttcttcaagtcttggtcggtctgctgtctgctgatgacatcaacatgctgacctgtgccacaggcgtcctgtccaacctcacctgcaacaacacacgcaacaaaacgcaggtgacccagagtaacggcgtggaggctcttattcacaccatcctgagggccagttcaaaacaggacgtgatcgagccagccgtctgcgccctgcgccacctcaccagccggcacccagaggctgagactgcacagaacgccgtacgaatgcattacggcatccctgctattgtcaaactgctcaatcaaccctaccactggccagttgtcaaggctgtggttggtctgatccgtaacctggccctgtgtccagccaatcaggctcctttgagggacgctgacgccattcccaaactggtcactttgctttcaaaagctcatcaggatgcacagaaacccggttcatctgctcaacgatcataccaggatggggtaagaatggaggagattgttgagggctgcactggtgctcttcatatcatggccagagatcctatgaaccgaggcaccattgccagcatggacaccattcctctgtttgttcagctgttgtattctccactggataacgtcaagcgtgtggcagctggtgttctgtgtgagctggctcttgataaacagtcggctgagatcatcgatgcggaaggagccagtgctcctctcatggagctccttcactccagcaacgaagggatcgccacctatgctgctgctgttctctacagaactgctgaggacaaaaacccagactataagaaaagagtttcagtagaactcacacactcactcttcaaacatgaccctgaggcttgggaaatggcacacaacactgtgatggatcccgtccttggcgatgaagagcttgatggctacggtcctgcaggatacggtggatatgctgatggcatgcatatggatcctctagatccagaaatgcaagacgattttaggagcggcatgccctacaactccatggccagagtctaccatgattac

SEQ ID NO: 68 - protein, 729 aa, Danio rerio; identical to SEQ ID NO: 56

SEQ ID NO: 69 - DNA, 1734 bp, Saccharomyces cerevisiae
  CDS (1)..(1734)
atgggttcatgttgtagttgcttgaaagattcttcagacgaggccagtgtctcaccaattgccgataatgaaagagaagcggtgactttattactagggtatttggaggataaagaccaattagacttttactctggtggtccactaaaggccctaactactttggtgtattcagataatctaaatttgcaaaggagcgccgctctggcattcgcagaaattactgaaaaatacgtccgtcaggtctctagagaggtactggaacccatcttaatattattacaaagccaagatccacagattcaagtggccgcttgtgcagccttgggtaatttggccgttaataatgaaaataaattattaattgtggaaatgggaggcttagagccattaataaaccaaatgatgggtgacaatgtagaagttcaatgtaatgctgttggatgcattaccaatttagccacaagggatgacaataaacataagattgctacttctggtgctttaattccattgactaagctagctaaatccaaacatataagagttcagagaaatgctacaggtgcattattaaatatgacacattctgaggaaaatagaaaagaattggttaatgcaggtgctgtgcctgtattggtatctttactgtcgtccaccgatcctgatgttcagtactattgtactactgctttatcaaatatagcagtggatgaagccaatcgcaagaagttggctcaaactgagccaagattggtttccaaattggttagtctgatggattctccatcttcaagggtaaaatgtcaagctactttggctttacgaaacctagcgtccgatacaagctaccaattagaaattgtaagggctggtgggttgcctcatttggtaaagttgattcaaagtgattctataccactggttttggctagtgtggcatgcattagaaacatttctattcaccctctaaatgaaggtttaattgttgatgcaggtttcttaaaaccattagtaagattgttggactataaggattcagaagaaattcaatgtcacgccgtatctactttgagaaatttggctgcatcatctgaaaaaaacagaaaagagttcttcgaaagtggtgctgtcgaaaaatgtaaggaactggctctagattcacctgttagtgttcaaagtgaaatttccgcatgttttgctattttagccctagcagatgtctccaaattggatctactggaagcaaatatcttagatgctttaatccctatgactttttcccagaaccaagaagtttctggtaatgctgctgctgctttggcaaatctatgttcaagagtgaataattatacaaaaattattgaagcatgggatcgtccgaatgaaggcattcgtggatttctgattagatttttgaaaagtgactatgctacctttgaacacattgcgctatggacaattttacaattgctagaaagtcataatgataaagtggaagatttggttaaaaatgatgacgacatcattaacggagtgagaaaaatggcagatgtgacctttgagcgtttacaaagatcaggaattgatgttaaaaatccggggagcaacaacaatccaagctcgaatgataacaacagtaataacaatgacacaggatctgaacatcaacctgtagaggatgcaagtttggaattgtataatattactcaacagattttacaatttttacat

SEQ ID NO: 70 - protein, 578 aa, Saccharomyces cerevisiae
MGSCCSCLKDSSDEASVSPIADNEREAVTLLLGYLEDKDQLDFYSGGPLKALTTLVYSDNLNLQRSAALAFAEITEKYVRQVSREVLEPILILLQSQDPQIQVAACAALGNLAVNNENKLLIVEMGGLEPLINQMMGDNVEVQCNAVGCITNLATRDDNKHKIATSGALIPLTKLAKSKHIRVQRNATGALLNMTHSEENRKELVNAGAVPVLVSLLSSTDPDVQYYCTTALSNIAVDEANRKKLAQTEPRLVSKLVSLMDSPSSRVKCQATLALRNLASDTSYQLEIVRAGGLPHLVKLIQSDSIPLVLASVACIRNISIHPLNEGLIVDAGFLKPLVRLLDYKDSEEIQCHAVSTLRNLAASSEKNRKEFFESGAVEKCKELALDSPVSVQSEISACFAILALADVSKLDLLEANILDALIPMTFSQNQEVSGNAAAALANLCSRVNNYTKIIEAWDRPNEGIRGFLIRFLKSDYATFEHIALWTILQLLESHNDKVEDLVKNDDDIINGVRKMADVTFERLQRSGIDVKNPGSNNNPSSNDNNSNNNDTGSEHQPVEDASLELYNITQQILQFLH

SEQ ID NO: 71 - DNA, 14052 bp, Homo sapiens
  CDS (1)..(14052)
atggtggccggcatgctcatgccacgggaccagctgcgggccatctatgaggtgctcttccgcgagggcgtgatggtggccaagaaggaccggcggccccgcagcttgcacccccatgtgcccggcgtcaccaacctgcaggtcatgcgtgccatggcgtccctgcgggcacggggcctggtccgcgagacctttgcctggtgccacttttactggtacctcaccaatgaaggcatcgcccacctccgccagtacctgcacctgccgccagagatcgtgcccgcctctctgcagcgcgtgcgccgccccgtcgccatggtgatgcccgcacgccgcaccccccacgtgcaggctgtgcagggtcccctgggctccccacccaagcgggggccgctgccgacggaggagcagcgggtctaccgtcggaaggagcttgaggaggtgtcacctgagacccctgtggtgcctgctaccacccagcggaccctggccaggccaggcccggagcctgccccagccacagatgagcgggatcgtgtgcagaagaaaaccttcaccaagtgggtcaacaagcacctcatcaaggcccagaggcacatcagtgacctgtatgaagacctccgcgatggccacaacctcatctccctgctggaggtcctctcgggggacagcctgccccgggagaaggggaggatgcgtttccacaagctgcagaatgtccagattgccctggactacctccggcaccgccaggtgaagctggtgaacatcaggaatgatgacatcgctgacggcaaccccaagctgacccttggcctcatctggacaatcattctgcacttccagatctcagatatccaggtgagtgggcagtcggaggacatgacggccaaggagaagctgctgctgtggtcgcagcgaatggtggaggggtaccagggcctgcgatgcgacaacttcacctccagctggagagacggccgcctcttcaatgccatcatccaccggcacaagcccctgctcatcgacatgaacaaggtgtaccggcagaccaacctggagaacctggaccaggccttctctgtggcggagcgggacctgggagtgacgcggctcctggaccctgaggacgtggatgtccctcagcccgacgagaagtccatcatcacctacgtctcgtcgctgtatgacgccatgccccgcgtgccggacgtgcaggatggggtgagggccaacgagctgcagctgcgctggcaggagtaccgggagctggtgctgctgctgcttcagtggatgcgacaccacacggccgcctttgaggaacgcaggttcccctccagcttcgaggagattgagatcctgtggtctcagttcctgaagtttaaggagatggagctaccagccaaggaggccgacaagaacaggtccaagggcatctaccaatccctggagggagcggtgcaagcaggccagctcaaggtgccccctggctaccacccgctggatgtggagaaggagtggggcaagctgcacgtggccatcctggagcgggagaagcagctccgcagcgagtttgagaggctggagtgtcttcagcgcatcgtgaccaagctgcagatggaggcggggctgtgtgaggagcagctgaaccaggccgacgccctgctgcagtcggatgtccggctgctggctgcaggcaaagtgccacagcgggcgggggaggtggaacgggacttggacaaggcggatagcatgatccggctgctcttcaacgacgtgcagaccctcaaggatggacggcacccgcagggcgagcagatgtaccgcagggtgtaccgtctgcacgagcgcctggtagccatccgcaccgagtacaacctacggctgaaggcaggcgtggcggcccctgcaacccaggtggcccaggtgactctgcagagtgtgcagaggcgccccgagctggaggactccactctgcgctacctgcaggacctgctggcctgggtggaggagaaccagcaccgtgtggatggcgctgagtggggtgtggacctgcccagcgtggaggcgcagctgggcagccaccgaggcctgcaccagtccatcgaagaattccgggccaagatcgagcgggcacggagtgacgagggccagctctcccccgccacccggggtgcctaccgtgactgcctgggtcggctggacctgcagtacgccaagctgctgaactcctccaaggcccgcctcaggtccctggagagcttgcacagctttgtggcagccgccactaaggagctaatgtggctgaatgagaaggaggaggaggaggtgggcttcgactggagcgaccgcaacaccaacatgaccgccaagaaggagagctactcggcgctgatgcgggagctggagctgaaggagaagaagatcaaggagctccaaaatgctggggaccggctgctgcgggaggaccacccggcccggcccacggtggagtccttccaggcggccctgcagacgcagtggagctggatgctacagctgtgctgctgtatcgaggcacacctgaaggagaacgctgcctactttcagttcttctcagatgtgcgggaggccgaggggcagttgcagaagctgcaggaggcactgcgtaggaaatacagttgtgatcgctccgccaccgtcacccggctggaggacctgctgcaggatgcccaggacgagaaggaacagctgaacgagtacaagggccacctctcaggcctggccaagcgggccaaggccgtcgtgcagctgaagccccgccacccagcccaccccatgcggggccgcctgcccctgctggccgtgtgcgactataagcaggtggaggtgactgtgcacaagggtgacgagtgccagctggtgggccctgcacagccgtcccactggaaggtgctcagcagctccggcagcgaggccgccgtgccctccgtgtgcttcctggtgcccccgcccaaccaggaggcccaggaggccgtcaccaggctggaggcccagcaccaggccctggtcacgctgtggcaccagttgcacgtggacatgaagagccttctggcctggcagagccttcgccgcgacgtgcagctcatccgctcctggtccctggccacgttccgcaccctgaagccagaggagcagcgccaagccctgcacagcctggagctgcactaccaggccttcctgcgggacagccaggacgcgggcggcttcggacccgaggaccggctgatggctgagcgcgagtacggctcctgcagccaccactaccagcagctgctgcagagcctggaacagggtgcacaggaagagtctcgctgccagcgctgcatctccgagctcaaagacatccggctgcagctggaggcctgtgagacgcgcaccgtgcaccgcctgcggctgccgctggacaaagagccggcacgggagtgtgcccagcgcatcgccgagcagcagaaggcacaggcagaggtggaggggctgggcaagggggtcgcccggctctctgccgaggccgagaaggtcttggccctaccagagccatcgcctgcggcccccacgctgcgctcggagctggagctgacgctgggcaagctggagcaggtccgcagcctgtctgccatctacctggagaagctcaagaccatcagcctggtgatccgcggcacgcagggggccgaggaggtgctcagggcccacgaggagcagctcaaggaggcccaggccgtgccggccaccctcccggagctcgaggccaccaaggcctctctgaagaagctgcgggcccaggccgaggcacagcagcccacgttcgacgccctgcgggatgagctgcggggggcacaggaggtgggggagcgactgcagcagcggcacggggagcgggacgtggaggtggagcgctggcgggagcgggtcgcccagttgcttgagcgctggcaggctgtgctggcccagaccgacgtgcggcagcgcgagctcgagcaactgggccgccagctgcgttactaccgcgagagtgcagaccccttgggcgcctggctgcaggacgccaggcggcggcaggagcagatccaggccatgccgctggccgacagccaggctgtgcgggagcagctgcggcaggagcaggccctgctggaggagatcgagcgccacggcgagaaggtcgaggagtgccagaggtttgcgaaacagtacatcaacgccatcaaggactatgaactccagctggtgacgtacaaggcgcagcttgagccggtggcctccccggccaagaagcccaaggtccagtcgggatcagagagtgtcatccaggagtacgtggacctgcgtacgcactacagcgagctgaccacactgacgagccagtacatcaagttcatcagcgagactctgcggcgcatggaggaggaggagaggctggctgagcagcagcgggcagaggagcgcgagcggctggccgaggtggaggccgcgctggagaagcagcggcagctggccgaggcgcacgcccaggcaaaggcacaggcggagcgggaggcgaaggagctgcagcagcgcatgcaggaggaggtggtgcggcgggaggaggcggcggtggacgcgcagcagcagaagcgcagcattcaggaggagctgcagcagctgcggcagagctcggaggcggagatccaggccaaggcccggcaggcagaggcggctgagcgcagccggctgcgcatcgaggaggagatccgcgtggtgcgcctgcagttggaggccaccgagcgccagcgtggcggggctgagggggagctgcaggcactgcgtgcacgggcggaggaggctgaggcacaaaagcgacaggcgcaggaggaggccgagcgcttgcggaggcaggtgcaggacgagagccagcgtaagcggcaggcggaggtggagctggcctcgcgcgtgaaggccgaggccgaggcggcgcgcgagaagcagcgggccctgcaggccctggaggagctgcggctgcaggcggaggaggcggagcggcgcctgcggcaggccgaggtggagcgagcgcggcaggtacaggtggccctggagacggcgcagcgcagtgcagaggcggagctgcagagcaaacgcgcctccttcgccgagaagacggcacagctggagcgctccctgcaggaggaacacgtggctgtggcacagctgcgggaggaggctgagcggcgggcacagcagcaggccgaggccgagcgggcgcgcgaggaggcagagcgggagctggagcgctggcagctcaaggccaacgaggcgctacggctgcggctgcaggcggaggaggtggcgcagcagaagagcctggcgcaggccgaggctgagaagcagaaggaggaggcggagcgcgaggcgcggcggcgcggcaaggcggaggagcaggccgtccggcagcgggagctggctgaacaagagctggagaagcagcggcagctggcggaaggcaccgcgcagcagcgcctggccgcggagcaggagttgatccggctgcgggccgagacggagcagggggagcagcagcggcagctgctggaggaggagctggcccggctgcagcgtgaggcggctgcagccacgcagaaacggcaggagctggaagccgagctggccaaggtgcgggccgagatggaggtgctgctggccagcaaggcgagggctgaggaggagtcgcgctccaccagcgagaagtccaagcagaggctggaggccgaggccggccggttccgcgagctggccgaggaggccgcccgcctgcgtgccctggcggaagaggccaagcggcagcggcagctggccgaggaagacgcggcgcggcagcgggccgaggcggagcgggtgcttgcggagaagctggccgccatcggcgaggccacgcggctcaagacggaggcggagatcgcgctcaaggagaaggaggcggagaacgagcgcctgcggcggctggcggaggacgaggccttccagcggcggcggctggaggagcaggccgcgcaacacaaggctgacatcgaggagcgcctggcccagctgcgcaaggcatcggacagcgagctggagcggcagaaggggctggtggaggacacgctgaggcagcggcggcaggtggaggaggagatcctggcgctgaaggcgagcttcgagaaggcggccgctggcaaggcggagctggagctggagctgggacgcatccgcagcaacgcggaggacacgctgcgcagcaaggagcaggccgagctggaggctgcgaggcagcggcagctggcggcggaggaggagcggcggcgccgtgaggctgaggagcgcgtgcagaagagcctggcggccgaggaggaggccgcacggcagcggaaggcggcgctggaggaagtcgagcggctgaaagccaaggtggaggaggcgcggcgcctgcgggagcgagcggagcaggagtcggcgcggcagctgcagctggcccaggaggccgcccagaagcggctgcaggcggaagagaaggcacacgccttcgcggtgcagcagaaggagcaggagctacagcagacgctgcagcaggagcagagcgtgctggaccagctgcgcggcgaggcggaggcggcccggcgggcggctgaggaggcggaggaggcccgggtgcaggcggagcgtgaggcggcgcagtcccggcggcaggtggaagaggccgagcggctgaagcagtcggcagaggagcaggcacaggcccgggctcaggcacaggcggctgcagagaagctgcgcaaggaggccgagcaagaggcggcgcggcgggcacaggcggagcaggcggccctgcggcagaagcaggcagctgacgcggagatggagaagcataagaaattcgccgagcagacgctgcggcagaaggcgcaggtggagcaggagctgacaacactgcggctgcagctggaggagaccgaccaccagaagaacctgctggacgaggagctgcagcggctgaaggcggaggccacggaggccgcacgccagcgcagccaggtggaggaggagctcttctcggtgcgcgtgcagatggaggagctgagcaagctcaaggcacgcatcgaggctgagaaccgcgcactcatcttgcgtgacaaggacaatacgcagcgcttcctgcaggaggaggctgagaagatgaagcaggtggcggaggaggccgcgcggctgagtgtggcggcccaagaggctgcgcgactgcggcagctggcagaggaggacctggcacagcagcgggccttggcagagaagatgctcaaggagaagatgcaggcggtgcaggaggccacgcgactcaaggctgaggcggaactgctgcagcagcagaaggagcttgcgcaggagcaggcgcggcggctgcaggaggacaaggagcagatggcgcagcagctggcggaggagacgcagggcttccagcggacgctggaggccgagcggcagcggcagctggagatgagcgctgaggctgagcgcctcaagctgcgtgtggccgagatgagccgagcccaggcccgcgctgaggaggacgcccagcgcttccggaagcaggcggaggagatcggtgagaagctgcaccgcacggagctcgccacccaggagaaggtgaccctggtgcagacactggagatccagcgacagcagagtgaccatgatgccgagcgcctgcgggaggccatcgctgagctggagcgtgagaaggagaagctccaacaggaggccaaactgctgcagctcaagtctgaggagatgcagacggtgcagcaggagcagctgctgcaggagacgcaggccctgcagcaaagcttcctctctgaaaaggacagcctgctacagcgggagcgcttcatcgagcaggagaaggccaagctggagcagctcttccaggacgaggtggccaaggcacagcagctgcgtgaggagcagcagcggcagcagcagcagatggagcaggaacggcagcggctggtggccagcatggaggaggcgcggcggcggcagcatgaggccgaggagggcgtgcggcgcaagcaggaggagctgcagcagctggagcagcagcggcggcagcaggaggagctgctggctgaggagaaccagaggctgcgtgagcagctgcagctcctggaggagcagcaccgggccgcgctggcgcactcagaggaggtcactgcctcgcaggtggctgccacaaagaccctgcccaatggccgggatgcacttgatggccccgcggcagaggcagagccggagcacagcttcgatggcctgcggcggaaggtgtcagctcagaggctgcaggaggccggcatcctgagtgcggaggagctgcagcggttggcgcagggccacaccacggtggacgagctcgcacggcgggaagacgtgcgccactacctgcagggccgcagcagtatcgcagggctgttgctgaaggccaccaatgagaagctgagtgtttacgccgccctgcagaggcagctgctgagtcccggcacggccctcatcctgctggaggcgcaggcggcctcaggcttcctgctggaccctgtgcggaaccggcggctgaccgtcaacgaggctgtgaaggagggtgtggtgggccccgagctgcaccacaagctgctgtcggccgagcgcgccgtcactggctacaaggacccctacactggccagcagatctctctcttccaagccatgcagaagggcctcatcgtccgggagcacggcatccgcctgctggaggcccagatcgccacgggcggcgttatcgaccccgtgcacagccaccgcgtgcccgtggacgtggcctaccggcgcggctacttcgacgaggagatgaaccgcgtcctggcggaccccagcgacgacaccaagggcttctttgaccccaacacgcacgagaacctcacgtacctgcagctactggagcgctgcgtggaggaccccgagacgggcctgtgccttctgccactcacggataaggctgccaagggcggggagctggtctacactgactccgaggcccgggacgtctttgagaaggccaccgtgtctgcgccgttcggcaagttccagggcaagacggtgaccatttgggagatcatcaactcggaatacttcacggcagagcagcggcgggacctgctgcggcagttccgcacgggccggatcacagtggagaagatcatcaagatcatcatcacggtggtggaggagcaggagcagaagggccggctttgctttgagggcctgcgcagcctggtgccagccgccgagctgctggagagcagggtcatcgaccgcgagctctaccagcagctgcagcgaggtgagcgctctgtgcgagacgtagccgaggtggacactgtgcggcgggctctccggggtgccaacgtcatcgcgggtgtatggctggaggaggcggggcagaagctgagtatctacaatgccctgaagaaagacctgctgccatccgacatggccgtggccctgttggaagcccaggccggcaccgggcacatcatcgaccccgccaccagcgcccggctgaccgtggacgaggcagtgcgtgctggcctggtgggccccgagtttcatgagaagctgctatcagccgagaaggctgtgacagggtacagggacccctacacagggcagagcgtctccctgttccaggccctgaagaagggcctcattccccgggagcagggcctgcgcctgttggacgcccagctgtccacgggcggcatcgtggaccccagcaagagccaccgcgtgcccctggatgtcgcctgcgcccgaggctgcctggatgaggagaccagcagggccctgtcggcaccaagggccgacgccaaggcctacagtgaccccagcacaggggagccggccacctacggcgagctccagcagcggtgccggcccgaccagctgaccgggctgagcctgctgccgctctcagaaaaggctgctcgggcccggcaggaggagctctactcagagctgcaggcccgtgagacctttgaaaagaccccggttgaggtccccgtgggtggcttcaagggcaggacggtgacggtgtgggagctcatcagctctgagtacttcactgcggagcagcggcaggagctgttgcgtcagttccgcacgggcaaggtcaccgtggagaaggtcatcaagattctcattaccatcgtggaggaggtggagaccctgcggcaggagaggctgtccttcagcggcctccgtgcccctgtgccagccagcgagctcctggcttccggggtcctcagcagagcccagtttgagcagctcaaggacggcaagacgacggtcaaggacctttcggagctgggctccgtgcggacgctgctgcagggcagtggctgcctcgccggcatctacctggaggacaccaaggagaaggtgtccatctacgaggccatgcgccggggcctgctgagagccacaacggctgcgctcctgctggaggcgcaggcggccactggcttcctggtggaccccgtgcggaaccagcgcctgtatgtccacgaggccgtgaaggcgggcgtggtgggccccgagcttcacgagcagctgctgtctgccgagaaggccgtcaccggctacagagacccctactcgggcagcaccatctccctcttccaggccatgcagaagggcctggttctccggcagcacggcatccgcctgctggaggcccagatcgccacgggcggcatcatcgaccccgtgcacagccaccgcgtgcctgtggacgtggcctaccagcgcggctacttcagtgaggagatgaaccgcgtcctggcggaccccagcgacgacaccaagggcttctttgaccccaacacgcatgagaacctcacgtacaggcagctgctggagcggtgcgtggaggaccccgagacgggcttgcgccttctgccactgaaaggggcggagaaggctgaggtggtggagaccacgcaggtgtacactgaggaggagacaagaagggcatttgaagagacacagatcgacattcccggcggcggcagccacggcggctccaccatgtccctgtgggaggtgatgcagtcggacctgatccccgaggagcagcgggcccagctgatggctgacttccaggccggccgggtgaccaaggaacgcatgatcatcatcatcatcgagatcattgagaagacagagatcatccgccagcagggtctggcctcctacgactacgtgcgccgccgcctcacggctgaggacctgttcgaggctcggatcatctctctcgagacctacaacctgctccgggagggcaccaggagcctccgtgaggctctcgaggcggagtccgcctggtgctacctctatggcacgggctccgtggctggtgtctacctgcccggttccaggcagacactgagcatctaccaggctctcaagaaagggctgctgagtgccgaggtggcccgcctgctgctggaggcacaggcagccacaggcttcctgctggacccggtgaagggggagcggctgactgtggatgaggctgtgcggaagggcctcgtggggcccgagctgcacgaccgcctgctctcggctgagcgggcggtcaccggctaccgtgacccctacaccgagcagaccatctcgctcttccaggccatgaagaaggagctgatccctactgaggaggccctgcggctgctggatgcccagctggccaccggcggcatcgtggacccccgcctgggcttccaccttcccctggaggtggcttaccagcgtggctacctcaacaaggacacgcacgaccagctgtcagagcccagcgaggtgcgcagctacgtggacccgtccaccgacgagcgcctcagctacacgcagctgctcaggcggtgccgtcgtgacgacggcaccggccagctgctcctgccactgtcggacgcccgcaagctgaccttccgtggcctgcggaagcagatcaccatggaggagctggtgcgctcgcaggtcatggacgaggccacggcgctgcagctgcgggagggcctgacctccatcgaggaggtcaccaagaacttgcagaagttcctggaaggcaccagctgcatcgctggtgtcttcgtggacgccaccaaggaacggctctcggtgtaccaggccatgaagaagggcatcatccgccccggcacagcctttgagctcctggaggcgcaggcggccaccggttacgtcatcgaccccatcaagggactgaagctgacggtggaggaggctgtgcgtatgggcattgtgggccccgagttcaaggacaagctgctgtcggccgagcgcgccgtcactgggtacaaggacccctactctgggaagctcatctccctcttccaggccatgaagaagggcctgatcctgaaggaccatggcatccgcctgctggaggcccagatcgccacgggcggcatcatcgaccctgaggagagccaccggctgcccgtggaggtggcctacaagcgcggcctcttcgatgaggagatgaacgagatcctgaccgacccctcggacgacaccaagggcttctttgaccctaacacggaggagaacctcacctacctgcagctgatggagcgttgtatcactgacccccagacgggcctgtgtctcttgccgctgaaggagaagaagcgggagcggaagacgtcctccaagtcctccgtgcgcaagcgccgagtggtcatcgtggaccccgagacgggcaaggagatgtcagtgtacgaggcctaccgcaagggcctgattgaccaccagacgtacctggagctgtccgagcaggagtgcgagtgggaggagatcaccatctcctcctcggacggcgtggtcaagtccatgatcatcgaccgccgctccgggcgccagtacgacatcgatgatgccatcgccaagaacctcatcgaccgctcggcactggaccagtaccgcgccggcacgctctccatcaccgagttcgccgacatgctctcgggcaacgccggtggtttccgctcccgttcctcctcggtgggatcctcctcctcctaccccatcagccccgccgtctccaggacccagctggcctcctggtcagaccccactgaggagacgggccccgtggctggcatcctggacacggagacgctggagaaggtgtccatcaccgaggccatgcaccggaacctggtggataacatcacggggcagcggctgctggaggcgcaggcctgcaccgggggcatcatcgaccccagcaccggtgagcgcttccctgtcaccgacgccgtcaacaagggcctggtggacaagatcatggtggaccgcatcaacctggcccagaaggccttctgcggcttcgaggacccacgcaccaagaccaagatgtcggccgcccaggccctgaagaagggctggctctactacgaggccggccagcgcttcctggaggtgcagtacctgaccggcggcttgatcgagcccgacacgccgggccgcgtgcccctggacgaggccctgcagcgcggcacggtggacgcccgcaccgcacagaagctgcgtgacgtgggcgcctactccaagtacctcacctgccctaagaccaagctcaagatctcctataaggacgcgctggaccgcagcatggtggaggagggcacggggctgcggctgctggaggctgccgcgcagtccaccaagggctactacagcccctacagcgtcagcggctccggctctaccgctggctcccgcaccggctcgcgcaccggctcccgggccggctcccgccgcggcagctttgacgccaccggctccggcttctccatgaccttctcttcatcctcctactcctcctcgggctacggccgccgctacgcctcggggtcctcggcctccctggggggccctgagtctgccgtggcc

SEQ ID NO: 72 - protein, 4684 aa, Homo sapiens
MVAGMLMPRDQLRAIYEVLFREGVMVAKKDRRPRSLHPHVPGVTNLQVMRAMASLRARGLVRETFAWCHFYWYLTNEGIAHLRQYLHLPPEIVPASLQRVRRPVAMVMPARRTPHVQAVQGPLGSPPKRGPLPTEEQRVYRRKELEEVSPETPVVPATTQRTLARPGPEPAPATDERDRVQKKTFTKWVNKHLIKAQRHISDLYEDLRDGHNLISLLEVLSGDSLPREKGRMRFHKLQNVQIALDYLRHRQVKLVNIRNDDIADGNPKLTLGLIWTIILHFQISDIQVSGQSEDMTAKEKLLLWSQRMVEGYQGLRCDNFTSSWRDGRLFNAIIHRHKPLLIDMNKVYRQTNLENLDQAFSVAERDLGVTRLLDPEDVDVPQPDEKSIITYVSSLYDAMPRVPDVQDGVRANELQLRWQEYRELVLLLLQWMRHHTAAFEERRFPSSFEEIEILWSQFLKFKEMELPAKEADKNRSKGIYQSLEGAVQAGQLKVPPGYHPLDVEKEWGKLHVAILEREKQLRSEFERLECLQRIVTKLQMEAGLCEEQLNQADALLQSDVRLLAAGKVPQRAGEVERDLDKADSMIRLLFNDVQTLKDGRHPQGEQMYRRVYRLHERLVAIRTEYNLRLKAGVAAPATQVAQVTLQSVQRRPELEDSTLRYLQDLLAWVEENQHRVDGAEWGVDLPSVEAQLGSHRGLHQSIEEFRAKIERARSDEGQLSPATRGAYRDCLGRLDLQYAKLLNSSKARLRSLESLHSFVAAATKELMWLNEKEEEEVGFDWSDRNTNMTAKKESYSALMRELELKEKKIKELQNAGDRLLREDHPARPTVESFQAALQTQWSWMLQLCCCIEAHLKENAAYFQFFSDVREAEGQLQKLQEALRRKYSCDRSATVTRLEDLLQDAQDEKEQLNEYKGHLSGLAKRAKAVVQLKPRHPAHPMRGRLPLLAVCDYKQVEVTVHKGDECQLVGPAQPSHWKVLSSSGSEAAVPSVCFLVPPPNQEAQEAVTRLEAQHQALVTLWHQLHVDMKSLLAWQSLRRDVQLIRSWSLATFRTLKPEEQRQALHSLELHYQAFLRDSQDAGGFGPEDRLMAEREYGSCSHHYQQLLQSLEQGAQEESRCQRCISELKDIRLQLEACETRTVHRLRLPLDKEPARECAQRIAEQQKAQAEVEGLGKGVARLSAEAEKVLALPEPSPAAPTLRSELELTLGKLEQVRSLSAIYLEKLKTISLVIRGTQGAEEVLRAHEEQLKEAQAVPATLPELEATKASLKKLRAQAEAQQPTFDALRDELRGAQEVGERLQQRHGERDVEVERWRERVAQLLERWQAVLAQTDVRQRELEQLGRQLRYYRESADPLGAWLQDARRRQEQIQAMPLADSQAVREQLRQEQALLEEIERHGEKVEECQRFAKQYINAIKDYELQLVTYKAQLEPVASPAKKPKVQSGSESVIQEYVDLRTHYSELTTLTSQYIKFISETLRRMEEEERLAEQQRAEERERLAEVEAALEKQRQLAEAHAQAKAQAEREAKELQQRMQEEVVRREEAAVDAQQQKRSIQEELQQLRQSSEAEIQAKARQAEAAERSRLRIEEEIRVVRLQLEATERQRGGAEGELQALRARAEEAEAQKRQAQEEAERLRRQVQDESQRKRQAEVELASRVKAEAEAAREKQRALQALEELRLQAEEAERRLRQAEVERARQVQVALETAQRSAEAELQSKRASFAEKTAQLERSLQEEHVAVAQLREEAERRAQQQAEAERAREEAERELERWQLKANEALRLRLQAEEVAQQKSLAQAEAEKQKEEAEREARRRGKAEEQAVRQRELAEQELEKQRQLAEGTAQQRLAAEQELIRLRAETEQGEQQRQLLEEELARLQREAAAATQKRQELEAELAKVRAEMEVLLASKARAEEESRSTSEKSKQRLEAEAGRFRELAEEAARLRALAEEAKRQRQLAEEDAARQRAEAERVLAEKLAAIGEATRLKTEAEIALKEKEAENERLRRLAEDEAFQRRRLEEQAAQHKADIEERLAQLRKASDSELERQKGLVEDTLRQRRQVEEEILALKASFEKAAAGKAELELELGRIRSNAEDTLRSKEQAELEAARQRQLAAEEERRRREAEERVQKSLAAEEEAARQRKAALEEVERLKAKVEEARRLRERAEQESARQLQLAQEAAQKRLQAEEKAHAFAVQQKEQELQQTLQQEQSVLDQLRGEAEAARRAAEEAEEARVQAEREAAQSRRQVEEAERLKQSAEEQAQARAQAQAAAEKLRKEAEQEAARRAQAEQAALRQKQAADAEMEKHKKFAEQTLRQKAQVEQELTTLRLQLEETDHQKNLLDEELQRLKAEATEAARQRSQVEEELFSVRVQMEELSKLKARIEAENRALILRDKDNTQRFLQEEAEKMKQVAEEAARLSVAAQEAARLRQLAEEDLAQQRALAEKMLKEKMQAVQEATRLKAEAELLQQQKELAQEQARRLQEDKEQMAQQLAEETQGFQRTLEAERQRQLEMSAEAERLKLRVAEMSRAQARAEEDAQRFRKQAEEIGEKLHRTELATQEKVTLVQTLEIQRQQSDHDAERLREAIAELEREKEKLQQEAKLLQLKSEEMQTVQQEQLLQETQALQQSFLSEKDSLLQRERFIEQEKAKLEQLFQDEVAKAQQLREEQQRQQQQMEQERQRLVASMEEARRRQHEAEEGVRRKQEELQQLEQQRRQQEELLAEENQRLREQLQLLEEQHRAALAHSEEVTASQVAATKTLPNGRDALDGPAAEAEPEHSFDGLRRKVSAQRLQEAGILSAEELQRLAQGHTTVDELARREDVRHYLQGRSSIAGLLLKATNEKLSVYAALQRQLLSPGTALILLEAQAASGFLLDPVRNRRLTVNEAVKEGVVGPELHHKLLSAERAVTGYKDPYTGQQISLFQAMQKGLIVREHGIRLLEAQIATGGVIDPVHSHRVPVDVAYRRGYFDEEMNRVLADPSDDTKGFFDPNTHENLTYLQLLERCVEDPETGLCLLPLTDKAAKGGELVYTDSEARDVFEKATVSAPFGKFQGKTVTIWEIINSEYFTAEQRRDLLRQFRTGRITVEKIIKIIITVVEEQEQKGRLCFEGLRSLVPAAELLESRVIDRELYQQLQRGERSVRDVAEVDTVRRALRGANVIAGVWLEEAGQKLSIYNALKKDLLPSDMAVALLEAQAGTGHIIDPATSARLTVDEAVRAGLVGPEFHEKLLSAEKAVTGYRDPYTGQSVSLFQALKKGLIPREQGLRLLDAQLSTGGIVDPSKSHRVPLDVACARGCLDEETSRALSAPRADAKAYSDPSTGEPATYGELQQRCRPDQLTGLSLLPLSEKAARARQEELYSELQARETFEKTPVEVPVGGFKGRTVTVWELISSEYFTAEQRQELLRQFRTGKVTVEKVIKILITIVEEVETLRQERLSFSGLRAPVPASELLASGVLSRAQFEQLKDGKTTVKDLSELGSVRTLLQGSGCLAGIYLEDTKEKVSIYEAMRRGLLRATTAALLLEAQAATGFLVDPVRNQRLYVHEAVKAGVVGPELHEQLLSAEKAVTGYRDPYSGSTISLFQAMQKGLVLRQHGIRLLEAQIATGGIIDPVHSHRVPVDVAYQRGYFSEEMNRVLADPSDDTKGFFDPNTHENLTYRQLLERCVEDPETGLRLLPLKGAEKAEVVETTQVYTEEETRRAFEETQIDIPGGGSHGGSTMSLWEVMQSDLIPEEQRAQLMADFQAGRVTKERMIIIIIEIIEKTEIIRQQGLASYDYVRRRLTAEDLFEARIISLETYNLLREGTRSLREALEAESAWCYLYGTGSVAGVYLPGSRQTLSIYQALKKGLLSAEVARLLLEAQAATGFLLDPVKGERLTVDEAVRKGLVGPELHDRLLSAERAVTGYRDPYTEQTISLFQAMKKELIPTEEALRLLDAQLATGGIVDPRLGFHLPLEVAYQRGYLNKDTHDQLSEPSEVRSYVDPSTDERLSYTQLLRRCRRDDGTGQLLLPLSDARKLTFRGLRKQITMEELVRSQVMDEATALQLREGLTSIEEVTKNLQKFLEGTSCIAGVFVDATKERLSVYQAMKKGIIRPGTAFELLEAQAATGYVIDPIKGLKLTVEEAVRMGIVGPEFKDKLLSAERAVTGYKDPYSGKLISLFQAMKKGLILKDHGIRLLEAQIATGGIIDPEESHRLPVEVAYKRGLFDEEMNEILTDPSDDTKGFFDPNTEENLTYLQLMERCITDPQTGLCLLPLKEKKRERKTSSKSSVRKRRVVIVDPETGKEMSVYEAYRKGLIDHQTYLELSEQECEWEEITISSSDGVVKSMIIDRRSGRQYDIDDAIAKNLIDRSALDQYRAGTLSITEFADMLSGNAGGFRSRSSSVGSSSSYPISPAVSRTQLASWSDPTEETGPVAGILDTETLEKVSITEAMHRNLVDNITGQRLLEAQACTGGIIDPSTGERFPVTDAVNKGLVDKIMVDRINLAQKAFCGFEDPRTKTKMSAAQALKKGWLYYEAGQRFLEVQYLTGGLIEPDTPGRVPLDEALQRGTVDARTAQKLRDVGAYSKYLTCPKTKLKISYKDALDRSMVEEGTGLRLLEAAAQSTKGYYSPYSVSGSGSTAGSRTGSRTGSRAGSRRGSFDATGSGFSMTFSSSSYSSSGYGRRYASGSSASLGGPESAVA

SEQ ID NO: 73 - DNA, 13629 bp, Mus musculus
  CDS (1)..(13629)
atgtctcagcaccggctccgtgtgcccgagccggaaggcctgggtagcaagagaaccagctcagaggacaacctctacctggctgtgctcagagcctccgagggcaagaaagatgaacgagaccgtgtgcagaagaaaactttcaccaagtgggtcaacaaacaccttatcaaggctcagaggcacatcagtgacctgtacgaagacctccgtgatggccacaacctcatctccctgctggaagtcctctcaggagacagcctgccccgcgagaaagggaggatgcgcttccacaagctgcagaatgtgcagattgccctggactatctccgacatcgccaggtgaagttagtgaacatcagaaatgatgacattgctgacggcaaccccaagctgaccctcggcctcatctggacaatcatcctgcacttccagatctcagacattcaggtgagcggacagtcggaggacatgacagcaaaggagaagctgctgctgtggtcacagcgtatggtagagggctaccaaggcctgcgctgtgacaacttcaccaccagttggcgcgatggccgtctcttcaatgctatcatccaccggcacaagcccatgctcatagatatgaataaagtgtatcgacagaccaacctggagaacctagaccaggcattctcggtggcagagcgggacctgggagttacacggctcctggacccagaagatgtggacgtccctcagcctgatgaaaagtccatcatcacctatgtttcatccctgtacgatgctatgccccgcgtgcctggtgcacaggacggagtgagggccaatgagctgcagcttcgttggcaggagtaccgggagcttgtgttgctgctgctgcaatggatccggcaccacaccgctgcttttgaggagcgcaagttcccctccagctttgaagagattgagatcctatggtgccagtttttgaagttcaaggagacagaacttcctgccaaggaggcagacaaaaaccggtccaaagttatctaccagtctttggagggggcagtacaagcgggccagctcaagattccccctggctaccacccactagatgtggagaaggagtggggcaagctgcatgtggccatcctggagcgggagaagcaactgcgaagcgagtttgagaggctggagtgtcttcagcgcattgtgagcaagctacagatggaggctgggctgtgtgaggagcagctgaaccaggcggacgccctactgcagtcggatattcggctgctggcctcaggcaaggtggctcagcgagctggggaagtcgagagagacctggacaaggctgatggtatgatccggctgttgttcaatgatgtgcagacccttaaagatgggcggcatccacagggtgaacagatgtaccggagggtgtatcgtctgcatgagcgcctggtagccatccgcactgagtacaacctccggctgaaggcaggagtgggtgcccctgtgacccaggtgaccctgcagagtacacagaggcgcccagagctagaggactccacactgcgctacctgcaagacctgctggcctgggtagaggagaaccagcgtcgaatagacagtgctgagtggggcgtggacttgcccagtgtggaggcccagctgggcagccaccgaggcatgcatcagtctatagaggaatttcgggccaagatcgagcgggctcggaatgatgagagccagctctcccctgccacccggggtgcctaccgggactgcctaggtcgcctagacctgcagtatgcaaagctgctgaactcctccaaggcccgcctccggtccctggagagcttgcacgggtttgtggcggcagctaccaaggagctgatgtggctgaatgagaaagaagaggaggaagtgggctttgattggagtgaccgcaataccaacatggcagccaagaaagaaagttactcggccctgatgcgagaactggaaatgaaggaaaagaaaatcaaggagatccagaacacaggggacaggctgctgcgggaagaccatcctgcccggcccacggtggagtccttccaggctgccttgcagacacagtggagctggatgctgcagctgtgttgctgcattgaagcacacttgaaagagaatacagcctacttccagttcttctcagatgttcgggaggcggaggaacagttgcagaagctacaggagacgttacgcaggaagtacagctgtgaccgcaccatcaccgtcaccaggctcgaggatctgctgcaggatgcccaggatgagaaggaacaactgaatgagtacaaggggcacctctcaggcctggccaagcgggccaaggctattgtgcagttgaagccacgcaaccctgcccacccggtgcggggccacgtgcccctgatagccgtgtgtgactacaagcaggtggaggtgactgtgcacaagggtgaccaatgccagctggtgggtcctgcccagccatcccactggaaggtgctcagtggttccagcagcgaggccgctgtgccttctgtgtgctttcttgtgccgccgcccaaccaggaggcccaggaagctgtcgctagactggaggcgcagcatcaggccctggtcacactgtggcaccagcttcacgtggacatgaagagccttctggcgtggcagagcctcagtcgggacatacagctcatccggtcctggtccctagtcacgttccgcacactgaagcccgaggagcagcgacaagctctgcgcaacctggaattgcactaccaggccttccttcgagacagccaggatgccggtggctttgggcctgaggaccgtctagtggcagagcgcgagtatggatcttgcagccgccattaccagcagttactacaaagcctggagcagggtgagcaggaggagtcccgctgtcagcgatgcatctcggagctcaaggatatccggctgcagctggaggcctgtgagactcggactgtgcaccgtctgcggctgccactggataaggaccccgcacgggagtgcgcccagcgcatcgctgagcaacagaaagcgcaggctgaggtggaggggctgggcaagggagttgcccggctgtctgctgaggctgagaaagttctagccttgccagagccgtcacctgctgcacccactctgcgctcggagttggaactgaccctgggcaagctggaacaggtccgaagcctgtctgccatctacctggagaaactcaagaccatcagcttggtgattcgcagtacccagggggctgaggaggtgcttaaaacccatgaggagcagctgaaggaggcccaggctgtgcctgccactctccaagagcttgaagccaccaaggcctcactaaagaagctgcgggcccaggccgaggcacagcagccagtattcaacaccctaagagatgagttgcggggggcacaggaggttggtgagcggctacagcagcggcatggtgagcgggacgtagaagttgagcgctggcgagaacgtgtcactcagttgctggagcgctggcaggctgttctagcccagacagatgtgcggcagcgtgagctcgagcagctgggccgccagcttcgctactatcgtgagagcgcggatcctctgagcgcctggctgcaggatgccaagaggcggcaagagcagatccaggccgtgccaatagccaactgtcaggctgcgcgagaacagctgcgccaggagaaggccctgctggaggagattgagcgtcatggtgagaaggttgaggagtgccagaagtttgctaagcagtacatcaatgcaatcaaggactatgagctccagctgatcacgtacaaggctcagcttgaacccgtggcctcccctgccaagaagcccaaggttcagtctggatcggagagcgtcatccaggagtacgtggatctgcgcacgcgctacagcgagctgaccacgctcacgagccagtatatcaagttcatcagtgagacccttcgccgcatggaagaggaggagcggctggctgagcaacagcgggcagaggagcgggagcgactggccgaggtggaggctgcgctggagaagcagcggcagctagctgaggcacacgcccaggctaaggcccaggcagagctggaagcacaagaactgcagcggcgcatgcaggaggaggtggcgcggcgcgaggaggcagcagtggacgcacagcagcagaagcgcagcatccaagaggagctgcagcacctgaggcagagctcggaggcagagatccaggccaaggcccagcaggtggaggctgcagaacgcagccggatgcgcattgaggaagagatccgtgtagtacgtctgcagctggagacaactgagcggcagcgtggaggggcggagggcgagctgcaggctctgcgcgctcgggctgaggaggcagaagcgcagaagcggcaggctcaggaggaagctgaacgcttgcgaaggcaggtgcaggatgagagccagcgcaaacggcaggcagaggcagagctggccctgcgtgtgaaggctgaagctgaggcagcgcgagagaagcagagggccctgcaggccctggatgagctgagactgcaggccgaggaggccgagcggcggctgcgccaagccgaggcagagcgggcacgccaagtgcaggtggccctggagacggcacagcgcagtgcggaagtggagctgcagagcaagcgggcatcctttgcagagaagaccgcacaattggagcgcactctgcaggaggagcatgtaacagtggcccagctgcgggaggaggccgagcgacgggcacagcagcaagctgaggctgagcgagcccgggaggaagctgagcgggagctggagcgctggcagctgaaggccaatgaagcactgcggctgcggctgcaggcagaagaggtggcacagcagaagagcctggcacaggccgatgccgagaagcagaaggaagaggccgagcgggaagcgcggcggcggggcaaggcggaggagcaggctgtgcggcagcgggagctggcggagcaggagctggagaagcagcggcagctggcggagggcaccgcacagcagcgcctggctgcggagcaagagctgatccgcctgcgggccgagacagagcaaggtgagcagcagcggcagctgctggaggaagagctggcccggctacagcacgaggccaccgcagccacgcagaagcgccaggagctggaggctgaactggctaaggtccgggcagagatggaggtacttctggccagcaaggcgcgagccgaggaagagtctcgctctaccagcgaaaagtctaagcagaggctagaggctgaggcaggccgctttcgggaactggccgaggaggctgcccggctgcgtgctctggcggaggaggccaagaggcagaggcagttggcagaggaggatgccgcccgccagcgggccgaggcagagcgggtgcttactgagaagctggctgccatcagtgaggccacacggctcaagacggaggcagagattgcactcaaagagaaggaggccgagaatgagcgcctgaggcgcctggcagaagacgaggccttccagcggcggcgtctggaggagcaggcggcactgcacaaggctgacatcgaggagcgcctggcccagctgcgcaaggcatcagagagcgagctggagcggcagaagggcttggtggaggacaccctgcgacagcggcggcaggtggaggaggagatcatggcgctgaaggtgagctttgagaaagccgccgcgggcaaggcagagctggagctggagctggggcgcattcgcagcaacgcggaggacacaatgcgcagcaaggagcaggcggaactggaggcggcccggcagcggcagttggcggcagaggaggagcagaggcgccgggaggccgaggagcgcgtgcagaggagcctggcagcggaggaggaagccgctcggcagcgcaaggtggcactggaggaggtcgagcgactcaaggccaaggttgaagaagcacggcgcctgcgagagcgggcagagcaggagtcggccaggcagctgcagctggcccaggaggccgcccagaaacggctgcaggcggaggagaaggcacacgcctttgtggtgcagcagcgagaggaggagctgcagcagacgcttcagcaagagcagaacatgctggatcggctgcggagtgaggcagaggcagcgaggcgagccgccgaggaggcggaggaggcccgggagcaggcggagcgcgaggcagcgcagtctcggaaacaagtggaagaggccgagcggctgaaacagtcagcagaggagcaggctcaggcccaggctcaggcgcaggcggccgcagagaagctgcgcaaggaagcggagcaggaggcggcgcgtcgggcccaggcagagcaggcagcgctgaaacagaagcaggcagccgacgcggagatggagaagcataaaaagtttgcagagcagacactccggcagaaggcccaggtagagcaggagctgaccacactgaggctgcagctagaggagactgaccaccagaagagcatcctggatgaggagctgcagcgactaaaggccgaggtaacagaggcagcccggcagcgcagccaggtagaggaggagctcttctctgtccgtgtgcagatggaggagctgggcaagctcaaggctcgcattgaagctgaaaaccgggccctcatccttcgtgacaaggacaacacacagcgcttcctggaggaggaggccgagaagatgaaacaggtggccgaggaagcggcacggttgagcgtggccgcccaggaggcagcacggctgaggcagctagcggaggaggacctggcgcagcagcgggccctggcagagaagatgctgaaggagaagatgcaggcggtgcaggaagccacgaggctcaaggccgaggctgagctgctgcagcagcagaaggagcttgcccaggagcaggcccggcggctgcaggaggacaaggagcaaatggctcagcagttggtagaggagacacagggtttccagaggactctggaggccgagcggcagcggcagctggagatgagcgcggaggccgagcgcctcaagctgcgcatggttgagatgagccgggctcaggcccgcgcggaggaggacgcccagcgcttccggaagcaggctgaagagatcggcgagaagctgcaccgcactgaacttgcgacacaggagaaggtgacgttggtgcagacgctggagatccagcgacagcagagtgaccacgatgccgagcgtctgagggaggccattgcggagctggagcgtgagaaggagaagctcaagcaggaggcgaagttactgcagctcaagtcggaggagatgcagactgtgcagcaggagcagatactgcaggagacccaggccctgcagaagagcttcctctctgagaaggacagcctgctgcagcgcgagcgcttcatcgagcaggagaaggccaagctggagcagctcttccaggacgaggtggctaaagcaaagcagctgcgtgaggagcagcagcggcagcagcagcagatggaacaggaaaagcaggagctgatggccagcatggaggaggccaggaggcggcagcgcgaggctgaggagggcgtgaggcgcaagcaagaggaactgcagcatctggagcagcagcggcagcagcaggagaagctcctggcggaggaaaaccagcggctgcgagagcggctgcagcgcctggaggaagagcaccgcgctgccttggctcactctgagatcgccaccacccaggccgcttccacgaaggcactgcccaacggccgggatgcacccgatggcccgtccgtggaggctgaacccgagtacacctttgagggactacgtcagaaggtgccggcccagcagctacaggaagcaggcatcctgagccaggaggaactgcagcgtttggcacagggtcacaccacggtggctgagctcacgcagcgggaagatgtgtaccggtacctgaagggccgcagcagcattgcaggactgttactgaagcccaccaatgagaaactgagtgtctacacagccctacagcggcagctgctcagccccggaacagctctgatcttgctggaggcccaggcagcctcgggcttcctgctggatcctgtgcggaatcggcggctgacagtcaatgaggctgtgaaggagggtgtcgtgggtcctgagctgcaccacaaactgctgtcagctgagcgtgccgtcaccggctacaaggacccctatacaggggaacagatctcgctcttccaggccatgaagaaggaccttattgtcagggaccatggcgtccgcctgctggaggcccagatcgccaccggtggcatcattgatcctgtgcacagccaccgtgtgcctgtggacgtggcctacaaacgtggctacttcgatgaagagatgaaccgcatcttgtctgacccaagcgatgacaccaagggcttcttcgaccccaacacccacgagaacctcacttacctgcagctgctggagcgctgtgtggaggaccccgagaccggcctgcgcctcctgccactcacagataaggctgccaagggtggcgagctggtgtacaccgatacggaggcccgtgacgtcttcgaaaaggccaccgtgtctgcaccgtttggcaagttccagggcaggaccgtgaccatctgggagatcatcaactcggagtacttcacggcggaacagcgacgggacctgctgcagcagttccgcacgggccacatcacggtggagaaaatcatcaaaatcgtcatcacagtggtggaggaacacgagcggaagggccagctctgctttgagggcctccgtgccctcgtgcccgccgcagagctgctggacagtggggtcatcagccacgaactctaccagcagctgcagcggggtgagcgttctgtgcgggaagtggccgaggcggacagcgtgaggcaggccctgcggggtaccaatgtcatcgccggtgtgtggctggaagaagcagggcagaagctgagcatctatgaggccctgaagaaagacttgctgcagccagaggtggctgtggccttgctggaggcccaggctggcactgggcatatcatcgaccctgccaccagcgccaggctgactgtggacgaggcggtgcgtgctggcctggtggggcctgagctgcacgagaagctgctgtcagccgagaaggccgtgacaggctacagggatccctactcaggacagagtgtctcactgttccaggccttgaagaagggtctcatcccccgagaacagggcctgcgcctgctggatgcccagttatccactggtggcattgtagaccccagcaaaagccaccgtgtgcccctggatgttgcctatgcccggggctacctggacaaagagactaacagggccctgacgtcacccagagatgatgccagagtctaccatgaccccagcacccaggagccagtcacctacagccagctccaacagcggtgccggtctgaccagctgaccggcttgagcctactgccactctcagagaaggccgtccgggcccggcaggaggaggtctactctgagctccaggcccgggagacactggagcaggccaaggttgaggttcctgtgggcagctttaagggcagggcgatgactgtgtgggagctcatcagctctgaatactttactgaggagcagcggcaggagttgctgcggcagttccgcacaggcaaggtcaccgtggagaaggtcatcaagattgtcatcaccatcgtggaggaggtggagactcggcggcaggagagactgtcctttagtggcctccgtgcccctgtgccggccagtgagctcctggacgccaagatcctcagcagagctcagtttgaccagctcaaggatggcaagacatcagtcaaagagctgtccgaggtgggctccgtgcggactctgctgcagggcagcggctgcctggccggcatctatctggaggactcgaaggagaaagtaaccatctatgaggccatgcgccggggcctcctcagacccagcacagccacgctcctgctggaggcccaggcagccactggtttcctggtggaccctgtgcggaaccaacgtctgtatgtccatgaggctgtcaaggcgggcgtagtgggccctgaactccatgagaagctgctgtcggccgagaaggccgtcactggctacaaggatccctactcgggcaacaccatctcgctgttccaggccatgaaaaagggcctggtcctcagggaccatgccatccgcctgctggaggcccaggtcgccacgggtggcatcatcgacccggtgcacagccaccgcctgcctgtggacgtggcctaccagcgtggctacttcgatgaggagatgaaccgtgtgctggcagatccaagtgatgacaccaagggcttctttgaccccaacacccacgagaacctcacctacctgcagctgctggagcgctgtgtggaggaccccgagaccggcctgcgcctcctgccactcaaaggggcagagaagaccgaggtggtagaaaccacacaggtgtatactgaggaggagactcggagggcgttcgaggagacgcagattgacatcccgggtggtggcagccacggtggctcctccatgtctctgtgggaggtgatgcagtcaaacatgatcccggaggatcagcgtgcccggctcatggctgactttcaggctgggagggtaaccaaggaacgcatgatcattatcatcatcgaaatcatcgagaagaccgagatcatccgccagcagaacctggcctcctatgactacgtgcgccgccgcctcactgccgaagacctgtacgaggcccggatcatctcccttgagacctacaacctcttccgggaaggcaccaagaacctccgtgaagtgctggagatggaatctgcctggcgctacctttacggcacaggcgcggtggccggtgtctacctgcctggctccaggcagacgctaaccatctaccaggcccttaagaaggggttgctgagtgccgaggtggcccgcttattgctggaagcacaggcagccacgggcttcctgctggacccagtgaagggggagcggctgaccgtggatgaggctgtgcggaagggcctggtaggccccgagctgcatgaccgcctcctctctgccgagcgagctgtaactggttaccgagacccctacacggaacagaccatctcactcttccaggccatgaagaaggagctgatccctgctgaggaggcgctgaggctgctggatgcgcagctagccacaggaggcattgtggacccccgcctgggtttccacctccctctggaggtggcttaccaacgcggctacctcaataaggacacgcacgaccagctgtcggagcccagcgaggtgcgcagctacgtggacccctccacggatgagcggctcagctacacacagctgctcaagcgttgccgccgtgatgaccccagcggccagatgctgctgctgctctctgatgcccgcaagctgaccttccgcggtctccgcaagcagatcactgtggaggagctggtacgctctcaagtcatggacgaggccacagcgctacagctacaagaaggcctgacctccatcgaggaggtcactaagaacctgcagaagttcctcgagggtaccagctgcattgccggagtctttgttgatgccaccaaggaacggctctcggtgtaccaggctatgaagaagggcatcatccgccccgggacagcctttgagctcctggaagcacaggcagccaccggctatgtcattgaccccatcaagggactcaagctgacggtggaagaagccgttcgtatgggtattgtgggccccgagttcaaggacaagctgctgtcagctgagcgtgccgtcactggctacaaggacccctactctgggaaactcatctccctcttccaggccatgaagaagggcctgatcctgaaggaccatggcatccgtctgctggaggctcagatcgccactgggggcatcattgaccccgaggagagccaccgtttgcctgtggaagtggcctataagcgcggcctctttgatgaggagatgaacgagatcttgactgatccctcagatgacaccaagggtttctttgaccccaacacagaggagaacctcacttacctgcagctgatggagcgctgcatcactgacccccagacgggcctgtgtctcctgcccctgaaggagaagaagcgggaacggaagacatcctccaagtcctcagtgcgcaagcgccgcgtggtgattgtggacccagagacgggcaaggagatgtctgtgtacgaggcctaccgcaagggtctcattgaccaccagacgtacctggagttgtcggagcaggagtgtgagtgggaagagatcaccatctcctcctcagatggcgtcgtcaagtctatgatcatcgaccgccgctctggtcgccagtatgacatcgacgacgccatcaccaagaacctcattgaccgctcagcactggaccagtaccgcgctggtacgctttcgatcactgagtttgctgacatgctctcaggcaatgccggtggcttccgttcccgctcctcctctgtgggctcatcttcctcctaccccatcagttctgctggccccaggacccagctagcctcctggtctgatccgactgaggagactggccccgtggccggcatcctggacacagagactctggagaaggtgtccatcacggaggccatgcaccgcaacctggtagacaacatcaccggccagcggctgctggaggcccaagcctgcaccgggggcatcattgaccccagcactggtgagcgcttcccggtcactgaagctgtcaacaagggcctggtggacaagatcatggtagaccgtatcaatctggcccagaaggccttctgtgggtttgaggacccacgcaccaagaccaagatgtcagctgcccaggccctgaagaagggctggctgtactatgaggcaggccagcgtttcctggaggtgcagtacctgaccggtggtctgatcgagcctgacacgcccggccgtgtgtctctcgacgaagctctgcaacgtggcactgtggatgcccgcacagcccagaagctgcgtgatgtcagtgcttactccaagtacctcacgtgccccaagaccaagctcaagatctcctacaaggacgctctggaccgtagcatggtggaggagggcacggggctgaggctgctggaggctgcggcacagtccagcaagggctactacagcccgtacagcgtcagtggctctggctcgaccgccggctcacgcactggttcacgcaccggctccagggccggctcccggcgtggcagctttgatgccactggctctggcttctccatgaccttttcttcttcctcctactcttcctcaggctatggccgccgctatgcctcagggccttcagcctctcttgggggccctgagtctgcagtggcc

SEQ ID NO: 74 - protein, 4543 aa, Mus musculus
MSQHRLRVPEPEGLGSKRTSSEDNLYLAVLRASEGKKDERDRVQKKTFTKWVNKHLIKAQRHISDLYEDLRDGHNLISLLEVLSGDSLPREKGRMRFHKLQNVQIALDYLRHRQVKLVNIRNDDIADGNPKLTLGLIWTIILHFQISDIQVSGQSEDMTAKEKLLLWSQRMVEGYQGLRCDNFTTSWRDGRLFNAIIHRHKPMLIDMNKVYRQTNLENLDQAFSVAERDLGVTRLLDPEDVDVPQPDEKSIITYVSSLYDAMPRVPGAQDGVRANELQLRWQEYRELVLLLLQWIRHHTAAFEERKFPSSFEEIEILWCQFLKFKETELPAKEADKNRSKVIYQSLEGAVQAGQLKIPPGYHPLDVEKEWGKLHVAILEREKQLRSEFERLECLQRIVSKLQMEAGLCEEQLNQADALLQSDIRLLASGKVAQRAGEVERDLDKADGMIRLLFNDVQTLKDGRHPQGEQMYRRVYRLHERLVAIRTEYNLRLKAGVGAPVTQVTLQSTQRRPELEDSTLRYLQDLLAWVEENQRRIDSAEWGVDLPSVEAQLGSHRGMHQSIEEFRAKIERARNDESQLSPATRGAYRDCLGRLDLQYAKLLNSSKARLRSLESLHGFVAAATKELMWLNEKEEEEVGFDWSDRNTNMAAKKESYSALMRELEMKEKKIKEIQNTGDRLLREDHPARPTVESFQAALQTQWSWMLQLCCCIEAHLKENTAYFQFFSDVREAEEQLQKLQETLRRKYSCDRTITVTRLEDLLQDAQDEKEQLNEYKGHLSGLAKRAKAIVQLKPRNPAHPVRGHVPLIAVCDYKQVEVTVHKGDQCQLVGPAQPSHWKVLSGSSSEAAVPSVCFLVPPPNQEAQEAVARLEAQHQALVTLWHQLHVDMKSLLAWQSLSRDIQLIRSWSLVTFRTLKPEEQRQALRNLELHYQAFLRDSQDAGGFGPEDRLVAEREYGSCSRHYQQLLQSLEQGEQEESRCQRCISELKDIRLQLEACETRTVHRLRLPLDKDPARECAQRIAEQQKAQAEVEGLGKGVARLSAEAEKVLALPEPSPAAPTLRSELELTLGKLEQVRSLSAIYLEKLKTISLVIRSTQGAEEVLKTHEEQLKEAQAVPATLQELEATKASLKKLRAQAEAQQPVFNTLRDELRGAQEVGERLQQRHGERDVEVERWRERVTQLLERWQAVLAQTDVRQRELEQLGRQLRYYRESADPLSAWLQDAKRRQEQIQAVPIANCQAAREQLRQEKALLEEIERHGEKVEECQKFAKQYINAIKDYELQLITYKAQLEPVASPAKKPKVQSGSESVIQEYVDLRTRYSELTTLTSQYIKFISETLRRMEEEERLAEQQRAEERERLAEVEAALEKQRQLAEAHAQAKAQAELEAQELQRRMQEEVARREEAAVDAQQQKRSIQEELQHLRQSSEAEIQAKAQQVEAAERSRMRIEEEIRVVRLQLETTERQRGGAEGELQALRARAEEAEAQKRQAQEEAERLRRQVQDESQRKRQAEAELALRVKAEAEAAREKQRALQALDELRLQAEEAERRLRQAEAERARQVQVALETAQRSAEVELQSKRASFAEKTAQLERTLQEEHVTVAQLREEAERRAQQQAEAERAREEAERELERWQLKANEALRLRLQAEEVAQQKSLAQADAEKQKEEAEREARRRGKAEEQAVRQRELAEQELEKQRQLAEGTAQQRLAAEQELIRLRAETEQGEQQRQLLEEELARLQHEATAATQKRQELEAELAKVRAEMEVLLASKARAEEESRSTSEKSKQRLEAEAGRFRELAEEAARLRALAEEAKRQRQLAEEDAARQRAEAERVLTEKLAAISEATRLKTEAEIALKEKEAENERLRRLAEDEAFQRRRLEEQAALHKADIEERLAQLRKASESELERQKGLVEDTLRQRRQVEEEIMALKVSFEKAAAGKAELELELGRIRSNAEDTMRSKEQAELEAARQRQLAAEEEQRRREAEERVQRSLAAEEEAARQRKVALEEVERLKAKVEEARRLRERAEQESARQLQLAQEAAQKRLQAEEKAHAFVVQQREEELQQTLQQEQNMLDRLRSEAEAARRAAEEAEEAREQAEREAAQSRKQVEEAERLKQSAEEQAQAQAQAQAAAEKLRKEAEQEAARRAQAEQAALKQKQAADAEMEKHKKFAEQTLRQKAQVEQELTTLRLQLEETDHQKSILDEELQRLKAEVTEAARQRSQVEEELFSVRVQMEELGKLKARIEAENRALILRDKDNTQRFLEEEAEKMKQVAEEAARLSVAAQEAARLRQLAEEDLAQQRALAEKMLKEKMQAVQEATRLKAEAELLQQQKELAQEQARRLQEDKEQMAQQLVEETQGFQRTLEAERQRQLEMSAEAERLKLRMVEMSRAQARAEEDAQRFRKQAEEIGEKLHRTELATQEKVTLVQTLEIQRQQSDHDAERLREAIAELEREKEKLKQEAKLLQLKSEEMQTVQQEQILQETQALQKSFLSEKDSLLQRERFIEQEKAKLEQLFQDEVAKAKQLREEQQRQQQQMEQEKQELMASMEEARRRQREAEEGVRRKQEELQHLEQQRQQQEKLLAEENQRLRERLQRLEEEHRAALAHSEIATTQAASTKALPNGRDAPDGPSVEAEPEYTFEGLRQKVPAQQLQEAGILSQEELQRLAQGHTTVAELTQREDVYRYLKGRSSIAGLLLKPTNEKLSVYTALQRQLLSPGTALILLEAQAASGFLLDPVRNRRLTVNEAVKEGVVGPELHHKLLSAERAVTGYKDPYTGEQISLFQAMKKDLIVRDHGVRLLEAQIATGGIIDPVHSHRVPVDVAYKRGYFDEEMNRILSDPSDDTKGFFDPNTHENLTYLQLLERCVEDPETGLRLLPLTDKAAKGGELVYTDTEARDVFEKATVSAPFGKFQGRTVTIWEIINSEYFTAEQRRDLLQQFRTGHITVEKIIKIVITVVEEHERKGQLCFEGLRALVPAAELLDSGVISHELYQQLQRGERSVREVAEADSVRQALRGTNVIAGVWLEEAGQKLSIYEALKKDLLQPEVAVALLEAQAGTGHIIDPATSARLTVDEAVRAGLVGPELHEKLLSAEKAVTGYRDPYSGQSVSLFQALKKGLIPREQGLRLLDAQLSTGGIVDPSKSHRVPLDVAYARGYLDKETNRALTSPRDDARVYHDPSTQEPVTYSQLQQRCRSDQLTGLSLLPLSEKAVRARQEEVYSELQARETLEQAKVEVPVGSFKGRAMTVWELISSEYFTEEQRQELLRQFRTGKVTVEKVIKIVITIVEEVETRRQERLSFSGLRAPVPASELLDAKILSRAQFDQLKDGKTSVKELSEVGSVRTLLQGSGCLAGIYLEDSKEKVTIYEAMRRGLLRPSTATLLLEAQAATGFLVDPVRNQRLYVHEAVKAGVVGPELHEKLLSAEKAVTGYKDPYSGNTISLFQAMKKGLVLRDHAIRLLEAQVATGGIIDPVHSHRLPVDVAYQRGYFDEEMNRVLADPSDDTKGFFDPNTHENLTYLQLLERCVEDPETGLRLLPLKGAEKTEVVETTQVYTEEETRRAFEETQIDIPGGGSHGGSSMSLWEVMQSNMIPEDQRARLMADFQAGRVTKERMIIIIIEIIEKTEIIRQQNLASYDYVRRRLTAEDLYEARIISLETYNLFREGTKNLREVLEMESAWRYLYGTGAVAGVYLPGSRQTLTIYQALKKGLLSAEVARLLLEAQAATGFLLDPVKGERLTVDEAVRKGLVGPELHDRLLSAERAVTGYRDPYTEQTISLFQAMKKELIPAEEALRLLDAQLATGGIVDPRLGFHLPLEVAYQRGYLNKDTHDQLSEPSEVRSYVDPSTDERLSYTQLLKRCRRDDPSGQMLLLLSDARKLTFRGLRKQITVEELVRSQVMDEATALQLQEGLTSIEEVTKNLQKFLEGTSCIAGVFVDATKERLSVYQAMKKGIIRPGTAFELLEAQAATGYVIDPIKGLKLTVEEAVRMGIVGPEFKDKLLSAERAVTGYKDPYSGKLISLFQAMKKGLILKDHGIRLLEAQIATGGIIDPEESHRLPVEVAYKRGLFDEEMNEILTDPSDDTKGFFDPNTEENLTYLQLMERCITDPQTGLCLLPLKEKKRERKTSSKSSVRKRRVVIVDPETGKEMSVYEAYRKGLIDHQTYLELSEQECEWEEITISSSDGVVKSMIIDRRSGRQYDIDDAITKNLIDRSALDQYRAGTLSITEFADMLSGNAGGFRSRSSSVGSSSSYPISSAGPRTQLASWSDPTEETGPVAGILDTETLEKVSITEAMHRNLVDNITGQRLLEAQACTGGIIDPSTGERFPVTEAVNKGLVDKIMVDRINLAQKAFCGFEDPRTKTKMSAAQALKKGWLYYEAGQRFLEVQYLTGGLIEPDTPGRVSLDEALQRGTVDARTAQKLRDVSAYSKYLTCPKTKLKISYKDALDRSMVEEGTGLRLLEAAAQSSKGYYSPYSVSGSGSTAGSRTGSRTGSRAGSRRGSFDATGSGFSMTFSSSSYSSSGYGRRYASGPSASLGGPESAVA

SEQ ID NO: 75 - DNA, 3120 bp, Bos taurus
  CDS (1)..(3120)
atgggggaggcggaggcggaggtgggagccgcagtggagctcagtggtctgcccaccagcatcccagacgagctgctcactctctacttcgagaaccgccgaagctctgggggtgggcctgtggcgagttggcagagactcggccgcgggggcatcctcacctttgaggagcctgcagatgccgcgagggtcctggcctggccggagcacactctgcagggggctcggctgagcctgcggccagccccaccacgcgcctctgcgcgcctgctgctccaaggattgcctcctggcaccacaccccagctactggagcagtatgtccaagctctgctttgtgccaccgggcacccggagcagccttgccacgcgctggccagtccccgaccagatcgcgccctggtgcaactgcccaagcccctttctgaggcagaagctggagtcctggaggtgcactcccgggccctgggcctggagggggctgaggtctccctggcctgggtgccccaggcccgggcagtgcgtgtggtaggaggcgacccccctgcagacctgctgctgctggagctgtacctggagaatgagcgccgcagcggcggggggcccctggagggcatgcacagccttccagggcacctgggcaccgtggtctccttccagcactggcgtgtggccgagcgggtgctgcagcgggaccaccggctgcagggctcagagctgaaacttgtccctcactacgatgtcctggagcctgaggagcttgctgaggacgctggtgaaggaagctgcccgggcgacctggggcctggggcccccaggcacgttctccaggaggcaggaggaccagcaagggaacagcattatgctggggatgtcacactgggctctgaggaggcgccagggcagtcaggagcctctctgagcacaggccctcaatgggacagctcgtcgctggcaccggctgggccagtcagctcagggccctgggggtcttcagaagaggagggactggggagccgaaggactgtggggtctccggacccagtggagatcgccatgcgctcttcagagcaggtggcgtcagtgagccaggggcccgcggggtcaccggggcagcagggcctggtggagatggtgctggcaatggagccgggagcaatgcgcttcattcagctctatcatgaggaccttctcaccggcctgggagatgtggccctcttcccactcgagggctcagatacgactggattccggctctgcggagccctggccccatgccgggcagccaaggagtttctgcaaagtctgctgggcagcgttagctgtcacatgctgagcctgaagcacccaggcagtgccaggttcctgctgagcccagaggggcagcaccttctccgggagctggaggcacagttccagtgcgtcttcaggacagagcatctggctggggccgtcctggacatggacctggaagaggtgggccccactgaggccctgcaggccctccctggcctctcctccaccccttggcctccagacgatccggaccgtgaccaggagaactcaggcctggaggaggtccgagagctgctggccactctggagggcctggatggggaagactggctgccgctggagctaggggaggaggagcctgaggggcagccagaggaggaggtgacaatccccagatctggggaggagcccttggcccccagcacaagagagcctgggtggctacaggaggaagctgagctacagctggcgctctaccggtccctgcagccgcggggccaggcagccgagcaggaggaggccgagctgcagcaggccctggccctctccctgctggagccgccccccctgagtggggagcaggagctcctctggggccagggcccaggtggctgggcccagctggaggtgcacgcctccttcgagcgggatatggacgagctggaccgggccttggaggccgccttggaggtgcacctcagggaggagctggtgggggccccgggctgtgtgctgcccgccgagctgtgcgcccgcctggagcggtgccatggcgtgagtgttgccctgcacggtggccacatcgtcctccgtggctttggggtccagcctacccacgcggcccatcacctggcggcgctgctggctggcccccgggatcagagctcagcctttcccttggcggcttcctgctccacacgtgaaggcccgaaggagcccctgggcaggctggagcgtctcgctgagagcagcagtgagttccaagcggtggtgcaggccttctgtgacacactggacacggcccacggcaggatccacgtggtgcgggtggagcgcgtgctacacccgctgctgcagcagcagtacgagctgcaccgggagcgcctggagcagtgctgtgagcggccggccgagcaggtcctgtaccacggcacagcgatgcccaccgtccccgacatctgcgcgcacggcttcaaccgcagcttctgcggccgcaatgcccagtccctccaggacggagccccgttcacctcctgcacgcccgcgcgtggggcccgggcgctgaggggcgtgcgcgcgtcggtgccggaggccatgtcgggcgaggaccaggaggttcgggcagtggttgaggatggctccaacgggggcagtggctcgcccagccctggggacacgctgccctggaacctggagaaaacccagcggagccggcgaggtggaggtggccccggaggaaatgggagtgtcttggaccctgccgaaagagcagtcatccgcattgcagccaagatcctgcctggcctccaggagctgccatcctggaggaggaaggggaaggtccggggcaaggaccctgaccgtgtgggctggcagcagacagcggctgcgccctctgggaactcggaccccggcgctgacagcccccccaccccatccctccgtgccgtcccgcgagccctggaagccgcgggcttctggacacggggtgcgcagcgtttccagctggaggaacgctgccggggcgttccgggggagggcgtttctcagccctgggagatggggcttgccaatctgatgggtggcaaagacattgtcttttaa

SEQ ID NO: 76 - protein, 1039 aa, Bos taurus
MGEAEAEVGAAVELSGLPTSIPDELLTLYFENRRSSGGGPVASWQRLGRGGILTFEEPADAARVLAWPEHTLQGARLSLRPAPPRASARLLLQGLPPGTTPQLLEQYVQALLCATGHPEQPCHALASPRPDRALVQLPKPLSEAEAGVLEVHSRALGLEGAEVSLAWVPQARAVRVVGGDPPADLLLLELYLENERRSGGGPLEGMHSLPGHLGTVVSFQHWRVAERVLQRDHRLQGSELKLVPHYDVLEPEELAEDAGEGSCPGDLGPGAPRHVLQEAGGPAREQHYAGDVTLGSEEAPGQSGASLSTGPQWDSSSLAPAGPVSSGPWGSSEEEGLGSRRTVGSPDPVEIAMRSSEQVASVSQGPAGSPGQQGLVEMVLAMEPGAMRFIQLYHEDLLTGLGDVALFPLEGSDTTGFRLCGALAPCRAAKEFLQSLLGSVSCHMLSLKHPGSARFLLSPEGQHLLRELEAQFQCVFRTEHLAGAVLDMDLEEVGPTEALQALPGLSSTPWPPDDPDRDQENSGLEEVRELLATLEGLDGEDWLPLELGEEEPEGQPEEEVTIPRSGEEPLAPSTREPGWLQEEAELQLALYRSLQPRGQAAEQEEAELQQALALSLLEPPPLSGEQELLWGQGPGGWAQLEVHASFERDMDELDRALEAALEVHLREELVGAPGCVLPAELCARLERCHGVSVALHGGHIVLRGFGVQPTHAAHHLAALLAGPRDQSSAFPLAASCSTREGPKEPLGRLERLAESSSEFQAVVQAFCDTLDTAHGRIHVVRVERVLHPLLQQQYELHRERLEQCCERPAEQVLYHGTAMPTVPDICAHGFNRSFCGRNAQSLQDGAPFTSCTPARGARALRGVRASVPEAMSGEDQEVRAVVEDGSNGGSGSPSPGDTLPWNLEKTQRSRRGGGGPGGNGSVLDPAERAVIRIAAKILPGLQELPSWRRKGKVRGKDPDRVGWQQTAAAPSGNSDPGADSPPTPSLRAVPRALEAAGFWTRGAQRFQLEERCRGVPGEGVSQPWEMGLANLMGGKDIVF

SEQ ID NO: 77 - DNA, 14058 bp, Canis familiaris
  CDS (1)..(14058)
atggtggcggggatgctcatgccgcgggaccagctgcgggccgtctacgaggtgctcttccgagaaggcgtcatggtggcaaagaaggatcggcggccccgcagcctgcaccctcacgtccctggcgtcaccaacctgcaggtcatgcgcgccatggcctccctgcgggcccggggcctggtgcgagagaccttcgcctggcgccacttctactggtacctcaccaatgagggcatcgcccacctacgccagtacctgcacctgccgccggagatcgtgcctgcctctctgcagcgcgtgcgccgccctgtcgccatggtgatgcccgcgcgccgcatcccccacgtgcagtctgtgcagggtcctctgagctgcccgccaaagtgggggccggtgccaactgaggaccctgcccatgaggagcggcgggtctaccgtcggaaggagcctgaggagggagcatctgagccccctgtggtgcctgctaccaccccggggaacctggcgaggcctggcccgaagcctgccccagccacagatgaacgggatcgtgtgcagaagaaaaccttcaccaagtgggtgaacaaacacctcatcaaggcccagagacacatcagtgacctgtatgaagacctccgcgatggccacaacctcatctccctgctggaggtgctctcgggggacagcctgccccgggagaagggcaggatgcgcttccataagctgcagaacgttcagatcgccctggactacctccgacaccgccaggtgaagttggtgaacatcaggaatgatgacatcgcggatggcaaccccaagctgacccttggcctgatctggacaatcatcctgcacttccagatctcggacatccaggtgagcgggcagtcagaggacatgacggccaaggagaagctcctgctgtggtcacagcgcatggtggagggctaccagggcctgcgctgtgacaacttcacttccagctggcgtgacggtcgcctcttcaacgccatcattcaccggcacaggcccatgctcatcgacatgagcaaggtgtatcgtcagaccaacctggagaacctagaccaggccttctccgtggcagagcgggacctgggcgtgacccggctcctggaccctgaggatgtggatgtccctcagcctgacgagaagtccatcatcacctacgtctcctccttgtacgacgcgatgccccgagtacctgacgtgcaggatggggtgaaggccaacgagctgcagctgcgctggcaggagtaccgggagctggtggtgctgctgctgcagtggatgcggcaccacactgccgccttcgaggagcacaggttcccgtccagctttgaagagatcgagattttgtggtgccagttcttgaaatttaaggagacggagcttccggccaaggaggcagacaagaaccggtccaagggcatctaccagtccctggagggtgcggtgcaagcaggccagctcaaggtgccccccggctaccaccccctggatgtggagaaggagtggggcaagctgcatgtggccatcctagatcgggagaagcagctccggagcgaatttgagaggctggagtgtcttcagcgcatcgtgagcaaactgcagatggaggctgggctgtgtgaggagcagctgaaccacgccgacgccctgcttcagtcggacgtgcggctgctggctgcgagcaaggctccacagcgggcggccgaggtggagcgggaccttgacaaggcagatggcatgatccggctgctgttcaacgatgtgcagaccctcaaggatgggcggcacccgcagggagagcagatgtaccgcagagtgtaccgcctgcacgagcgcttggtggccatccgaaccgagtacaacctccggctaaagtccggcgtagctgcccccgtgacccaggtgactatgcagaccacgcagaggcgccctgagctcgaggatgccacgctgcgctacctgcaggacctgctggcctgggtggaggagaaccagcgccgggtggacagtgccgagtggggcggggacctgcccagtgtggaagcgcagctgggcagccaccgtggcctgcaccagtccattgacgagttccgggccaagattgagcgggcgcgggctgatgagggccagctctcccctgccccccggggcacctacagggactgcctgggccggcttgacctgcagtacgccaagctgctgaactcctctaaggcccgtctgcggtccctggagagcctgcacggctttgtggcggctgccaccaaggagctgatgtggctcagtgagaaggaggaggaggaggtgggcttcgactggggggagcacaactctaacatggccgccaagaaggagagctactcggctctgatgcgcgagctggaggtgaaggaaaagaagatcaaggagattcagagcaccggggaccggctgctgcgggaggggcaccctgcccggcctacagtggagtccttccaggccgccctgcagacccagtggagctggatgcttcagctgtgctgctgcatcgaggcgcacctgaaagagaacaccgcctacttccagttcttctcggacgtgcgggagactgaggaacagctccggaagctgcaggagatgctgcgcaggaagtatatctgtgaccgctccatcaccgtcacgcgcctggaggacctgctacaggatgcccaggatgagaaggagcagctgaacgagtacagggcacacctgtcagggctggccaagcgggccaaggctgtcgtgcagctgaagccccgagaccaggcccagcctgtgcggggtctcgtgccgctgcaggctgtgtgtgactacaagcaggtggaggtgactgtgcacaagggtgaccagtaccagctgctgggccccgcacagcccgcgcactggaaggtgctcagcagctctggcagtgaggccgccgtgccctctgtgtgtttcctcgtgcctccgcccaaccaggaggcccaggaggccgtcagcaggctggaggcccagcaccaggccctggtcgcgctgtggcaccagctgcacgtggacatgaagagtctcctggcatggcagtgcctcagcagggacgtgcagctcatccgctcctggtccttggtcacgttccggacgctgaagcccgaggagcaacgccaagccctgcgcagcctggagcttcactaccaggccttcctgcgggacagccaggatgctgggggctttgggcctgaggaccggctgcaggccgagcgcgagtacggctcctgcagccggcactaccagcagctgctgcagagcgcggagcagggtgcacaggaggagtcccgctgccagcgctgcatctctgagctcaaggacatccggctgcagctggaggcctgcgagacccgcaccgtgcaccgcctgcggctgccgctggacaaagagcccgcgcgagagtgtgcgcagcgcatcgccgagcagcagaaagcacaagctgaggtggaaggactaggcaagggtgtcgcccggctctctgcggaggccgagaaggtcctggccctgcccgagccgtcacctgccgcccccaccctgcgctcagagctggagctgaccctgggcaagctggagcaggtccgcagcctgtctgccatttacctggagaagctcaagaccatcagtctggtgatccgcagcacgcagggggctgaggaggtgctcagggcccacgaggagcagctcaaggaggcccaggctgtgcctgccacccttccggatcttgaggccaccaaggctgcgctgaagaagctgcgggtccaggcggaagcacagcagcccgtgtttgatgccctgcgggacgagctgcggggggctcaggaggtgggggagcggctgcagcggcagcacggcgagcgggacgtggaggtggagcgctggcgagagcgggtcgcacccctgctggagcgctggcaggctgcactggcccagaccgacgtgaggcagcgcgagctcgagcagctgggccgccagctccgctactaccgcgagagcgcggacccgctgggcacctggctgcaggacgccaagcagcggcaggagcggatccaggccgtgccgctagccaacagccaggccgtgcgggagcagctgcagcaggagaaggagctgctggaggagatcgagcggtatggcgagaaggtggatgagtgccagcagctggccaagcagtacattaatgccatcaaggactacgagcttcaactggtcacgtataaggcgcagctggagccagtggcctccccagccaagaagcccaaggtccagtccgggtctgagagcgtcatccaggagtatgtggacctgcgcacgaggtacagcgagctcaccacgcttacaagtcagtacatcaagttcatccgcgagaccctgcggcgcatggaggaggaggagaggctggctgagcagcagcgggcagaggagcgggaacggctggccgaggtggaggccgcgctggagaagcagcggcagttggccgaggcccacgcgcaggcgaaggcgcaggccgagcgggaggcagaggagctgcagcggcgcatgcaggaggaggtggcacggcgggaggaggccgcggtggacgcacagcagcagaagcggagcattcaggaggagctgcagcacttgcggcagagctcggaggccgagatccaggccaaggcccggcaggtggaggccgcagaacgcagccgggtgcgcatcgaggaggagatccgcgtggtccgcctgcagctggaggccactgagcgccagcggggcggggccgagggcgagctgcaggccctacgtgcgcgggcggaagaggccgaggcgcagaagcggcaggcacaggaggaggcggagcgcttgcggcggcaggtgcaggacgagagccagcgcaagcggcaggcagaggcggagctggccctgcgcgtgaaggccgaggccgaggcggcccgagaaaagcagcgggccctgcaggcgctcgaggacgtgcggctccaggccgaggaggcggagcggcgcctgcggcaggcggaggccgaccgggcccgccaggtgcaggtggccctggagacggcgcagcgcagcgcagaggtggagctgcagagcaagcgcgcctccttcgccgagaagactgcgcagctggagcgcacgctgcaggaagagcacgtggccgtggcacagctgcgcgaggaggcggagcggcgggctcagcagcaggcggaggccgagcgcgcccgggaggaggcggagcaggagctggagcgctggcggctgaaggccaacgaggcactgcgcctgcggctgcaggcggaagaggtggcccagcagaagagcctggcgcaggctgaggccgagaagcagaaggaggaggcggagcgggaggcgcggcgccggggcaaggcggaggagcaggccgtgcggcagcgggagctggccgagcaggagctggagaagcagcggcagctggcagagggcaccgcgcagcagcgcctggtggcggagcaggagctgatccggctgcgggccgagacggagcagggggagcagcagcggcagctgttggaggaggagctggcgcgcctgcagcgggaggcggccgcagccacgcacaagcgccaggagctggaagccgagctggccaaggtgcgggctgagatggaggtgctgctggccagcaaggcgcgcgcagaggaggagtcccgctccaccagcgagaagtccaagcagaggctggaggccgaggccagccggttccgcgagctggccgaggaggccgcccgcctgcgtgccctggctgaggagaccaagcggcagcggcagctggccgaggaggatgcggcccggcagcgggcggaggcggagagggtactggccgagaagctggccgccatcagcgaggccacgcggctcaagaccgaggccgagatcgccctcaaggagaaggaggcggagaatgagcgtctgcggcggctggcggaagacgaagccttccagcggcggcggctggaggagcaggccgcccagcacaaggcggacatcgaggagcggctggcgcagctgcgcaaggcgtcagagaacgagctggagcggcagaaggggctggtggaggacacgctgcggcagcggcggcaggtggaggaggagatcctggccctgaaggcgagcttcgagaaggcagctgccggcaaggcggagctggagctggagctcgggcgcatccgcagtaacgccgaggacacactgcgcagcaaggagcaggctgagctggaggccacgcggcagcggcagctggcggctgaggaggagcagcggcgccgcgaggccgaggagcgcgtgcaaaagagcctggctgctgaggaggaggccgcgcggcagcgcaagtctgccctggaggaggtggagcggctcaaggccaaggtggaggaggcccggcgcctgcgtgagcgagcggagcaggagtcggctcggcagctacaactggcccaggaggccgcccagaagcggctgcaggccgaggagaaggcgcacgccttcgccgtgcagcagaaggaacaggagctgcagcagacactccagcaggagcagagcatgctggagcggctgcgggccgaggcggaggcggcgcggcgggcggccgaggaggcggaggaggcgcgggagcgggccgagagggaggcagcacagtcccggcggcaggtggaggaggccgagaggctgaagcagctggccgaggagcaggcgcaggcccaggcgcaggcgcaggccgccgcggagaagcttcgcaaggaagcggagcaggaggcggtgcggcgggcgcaggcagagcaggccgccctgaagcagaagcaggtggccgacgccgagatggagaagcacaagaagtttgctgagcagactttgcggcagaaggcgcaggtggagcaggagctgaccacgctgaggctgcagctggaggagaccgaccaccagaagagcatcctggacgaggagctgcagcggctgaaggccgaggtgactgaggcagcccgccagcgcaaccaggtggaggaggagctcttctctgtgcgcgtgcagatggaggagctgagcaagctcaaggcacgcatcgaggcggagaaccgtgcgctcatcctccgcgacaaggacaacactcagcgcttcctgcaggaggaggccgagaagatgaaacaggtggcagaggaggccgcccggctgagcgtggccgcccaggaggcagcccggctgcggcagctggccgaggaggacctggcacagcagcgggccctggcggagaagatgctcaaagaaaagatgcaggcggtgcaggaggccactcgcctcaaggccgaggcggagctgctgcagcagcagaaagagctggcgcaggagcaggcccgacagctgcaggaggataaggagcagatggcccagcagctggctcaggagacgcagggtttccagcggacgctggaggcggagcggcagcgacagctggagatgagcgccgaggctgagcgcctcaagcttcgtgtggccgagatgagccgggcccaggcccgcgccgaggaggacgcccagcgcttccgcaaacaggccgaggagatcggtgagaagctgcaccgcacagagctcgccacgcaggagaaggtgacactggtacacactctcgagattcagcggcagcagagcgaccatgacgccgagcgcctacgggcggctatcaccgagctggagcgtgagaaggagaagctccaggaggaggccacgttgctgcagcagaagtctgaggagatgcaggtggtgcagcaggagcagctgctgcaggagacgcgggccctgcaggagagcttcctgtcagagaaggaccgcctgctgcagcgggagcgcttcatcgagcaggagaaggccaagctggagcagctcttccgggacgaggtggccaaggcgcagaaattgcgtgaggagcagcagcggcagcagcagcagatggagcaggagcgggagcagctggtggccagcatggaggaggcccggcagtgccagcgtgaggccgaggagggcgtgcgccgcaagcaggaggagctgcagcttctcgagcagcagcggcagcagcaggagcgactgctggccgaggagaaccagcggctgcgcgagcggctacagcgcctggaggaggagcaccgggccgccttggcgcattcggaggagatcgccgcctcgcaggccgcggctgccaaagccctgcccaacggccgggatgcgcccgacggcccagccgtggaggcagagcctgagcacatgttcgatggccttcggcggaaggtgccagcccagcggctgcaggaggtgggcatcctgagcgcagaggagctgcagcggctggcccagggccgcacgacagtggccgagcttgctcagcgggaggacgtgtgccagtacctgcagggccgcggtggcatcgccgggctgctgctcaaaccggccaacgagaagctgagtatctacgcggccctccggaggcagctgctgagcccaggcacggcgctcatcctgctggaggcacaggcggccactggcttcctcctggaccccgtgcagaaccgacggctgactgtcaacgaggctgtgaaggaaggcgtggtggggcccgagctgcaccacaagctgctgtcggccgagcgcgccgtcaccggctacaaggacccctacaccggtgagcagatctcgctcttccaggccatgcagaaggagctcatcgtgcgcgaccacggcatccgcctgctggaggcccagatcgccacgggcggcatcatcgacccggtacacagccaccggctgcccgtggacgtggcctaccagcgcggctacttcgacgaggagatgaaccgcgtgctggccgacccgagcgacgacaccaagggcttcttcgaccccaacacgcacgagaacctcacgtatctgcagctgctggagcgctgcgtgctcgaccccgagacaggcctgcgcctgctgcccctcacggaccaggccgccaggggcggtgagctggtctacaccgactccgaggcccgggacgtgttcgagaaagccactgtgtctgcaccgttcgggaagttccagggcaggacggtgaccatctgggagctcatcaactccgagtacttcacgacggagcagcggcgggatctgctgaggcagttccgcatgggcaaggtcaccgtggagaagatcatcaagatcgtcatcacggtggtggaggaacacgagcagaaaggccagctctgcttcgagggcctgcgcgccctcgtacccgccgccgagctgctcgagagcggggtcatagaccacaacctctaccgccagctgcagcggggcgagcgctctgtgcgagaggtggccgaggtggacgccgtgcggcgggccctgcggggcaccagcgtcattgcaggggtgtggctggaggagacaggacagaggctgagcatctacgaagccctgaagaaggatctcctgcctccagaggtagcagtggctctcctggaggcccaggccggcactggccacatcattgaccccgccacgagcgcccggctcaccgtggacgaggcggtgcgtgctggcctggtggggcccgagctgcatgagaagctgctgtcggccgagaaggccgtgacgggctacaaggacccgtactcggggcagagtgtttctctcttccaggccctgaagaagggcctcatccccagggagcagggcctgcgtctgcttgatgcccagttgtccacgggtggcatcgttgacccaagcaagagccaccgcgtgcccatggacgtggcctacgcccggggctacctggaccaggagaccagccgagccctgtcggcgccccaagacgaagccaagacctaccacgaccccagcacgcaggagcccgtcacctacggccagctccagcagcaatgccggcccgacccgctgacggggctgagcctgctgccgctctcggaacaggccgctcaggcccggcgggaggggctctactccgagctgcaggcccgtgagacctttcagaagacccccgtggaggtccccgtgggcagcttcaagggcaggacggtgacggtgtgggagctcctgagctccgagtacttcacgactgagcagagacaggagctgctgcggcagttccgcacgggtaccgtcaccgtggagaagatcatcaagatcgtcatcaccattgtggaggaggtggagactgtgcggcaagagaggctgtcgttcagtggcctccgtgccccggtgccagccagcgagctcctggcctctggggtcctcagcaggacccaattcgagcagctcaaggatggcaagacgtcggtgaaagacctatcagagctgagctccgtgcggacgctgctccagggcagcggctgcctggccggcatctacctggaggaatccaaggagaaggtgaccatctacgaggccatgcggcggggcctgctcaggcccagcacggccactctcctgctcgaggcgcaggcggccacgggcttcctcatcgaccccgtgcgcaaccagcgcttgtacgtccatgaggctgtgaaggcgggtgtggtggggcccgagctgcacgagaagctgctgtcggccgagaaggccgtgaccggctacaaggacccgtattcgggcagcaccatctcgctcttccaggccatgaagaagggcctggtccttcgggagcatggcatccgcctgctggaggcccagatcgccacgggtggcatcatcgacccggtgcacagccaccggctgcccgtggacgtggcctaccagcgcggctacttcgacgaggagatgaaccgcgtgctggccgacccgagcgacgacaccaagggcttcttcgaccccaacacgcatgagaacctcacgtacctgcagctgctggagcgctgtgtggaggaccccgagacgggccttcgcctgctgcccctgaaaggcgccgagaagacggaggtggtggagtccacgcaggtgtacacggaggaggagacccgcagggcattcgaggagacgcagatcgacatccctggcagcgccggccgcagcggctccactatgtccctgtgggaggtgatgcagtcggacctgatcccggaggagcagcggacccggctcatggcggacttccaggccggccgcgtgactaaggagcgcatgatcatcatcatcatcgagatcatcgagaagaccgagatcgtgcgccagcagaacctggcctcctatgactacgtccggcgtcgtctcactgccgaggacctgtacgaggcccggatcatctcccgcgagacctacagcttcctccgggaggggaccaagagcctccgacaggtgcttgaggaggaagaggcctcacgctacctctacggcacgggctgcgtggccggcgtctacctgccgggctccaggcagacactcaccatctaccaggccctcaagaaggggctgctgaacgccgaggtggcccgcttcctgctggaggcgcaggcggccacgggcttcctcctggagcccgtgaagggcgagcggctgactgtggacgaggccgtgcgcaaaggcctggtgggccccgagctgcatgaccggctgctctcagcggagcgggccgtgaccggctaccgcgacccctacaccgagcagaccatctccctcttccaggccatgaagaaggacctgatccccaccgacgaggccctgcggctgctagatgcccagctggccacgggcggcatcgtggacccacacctgggcttccacctccccttggaggtggcctaccagcgtggctacctcaacaaagacacgcacgaccagctctccgagcccagcgaggtgcgcagctacctggatccgtccacggacgagcgcctcagctacacgcagctgctccggcggtgccgccgccacgagaccagcggccagatgctcctgcctctctcggacgcccgcaagctgaccttccgcgggctgcgcaagcagatcacggtggaggagctggtgcgttcgcaggtcctggacgaggccaccgcgctgcagctgcaggagggcctgacgtcggtggaggaggtcaccaagaacctgcagaagttcctcgagggcacgagctgcattgcgggcgtcttcgtggatgccaccaaggagcggctgtcggtgtaccaggccatgaagaagggcatcatccgccctggcacggccttcgagctcctggaggcgcaggcggccactggctacgtcatcgaccccatcaaggggctgaagctgaccgtggaggaggccgtgcgcatgggcatcgtgggtcccgagttcaaggacaagctgctgtcggccgagcgcgccgtcattggctacaaggacccctactctgggaagctcatctccctgttccaggccatgaagaagggcctcatcctgaaggaccacggcatccgcctcttggaggcccagattgccacgggcggcatcatcgaccccgaggagagccaccggttgcctgtggaggtggcctacaagcgcggcctctttgatgaggagatgaacgagatcctgactgacccgagcgatgacaccaagggcttcttcgaccccaacacggaggagaacctcacgtacctgcagctgatggagcgctgcatcacggacccccagacgggcttgtgcctgctgcccctgaaggagaagaagcgggagcggaagacgtcctccaagtcatcggtgcgcaagcgccgcgtggtgatcgtggatcccgagacaggcaaggagatgtccgtgtacgaggcgtaccgcaagggcctcatcgaccaccagacgtacctggagctatccgagcaggagtgcgagtgggaagagatcaccatctcgtcctcggacggcgtggtcaagtccatgatcatcgaccgccgctcaggccgccagtacgacatcgacgaggccatcgccaggaacctcatcgaccgctcagcactggaccagtaccgcgcgggcacgctctccatcacggagttcgcggacatgctgtcaggcaacgctggcggcttccgctcccgttcctcttccgtgggctcctcctcctcctaccccatcagccccgccacctccaggacccaggcggcctcctggtcagaccccaccgaggagacgggccccgtggccggcatcctggacacggaaacgctggagaaggtgtccatcacggaggccatgcgccgcaacctggtggacaacatcaccgggcagcggctgctggaggcccaggcctgcacgggcggcatcatcgaccccagcagcggtgaacgcttccccgtcacggacgccgtcagccggggcttggtggacaagatcatggtggaccgcatcaacctggcgcagaaggccttctgcggcttcgaggacccgcgcaccaagaccaagatgtcggctgcacaggccctgaagaagggctggctgtactatgaggcgggccagcgcttcctggaggcgcagtacctgacgggcggcctcatcgagcccgacgtgccgggccgcgtgcccctcgacgaggccctgcagcggggcatggtggacgcccgcacagcccagaagctgcgggacgtcggcgcctactccaagtacctcacctgccccaagaccaagctcaagatctcgtacaaggacgcgctggaccgcagcatggtggaggagggcacggggctgcggctgctggaggccgccgcccagtccagcaagggctactacagcccctacagcgtcagcggctccggctcggccgccggctcgcgctccggctcgcgcacgggctcccgggctggctcccgccggggcagcttcgacgccaccggctccggtttctccatgaccttctcctcgtcctcctactcttcctcaggctacggccgccgctacgcctcagggcccgtgtcctccctggggggccccgagtccgcggcggcc

SEQ ID NO: 78 - protein, 4686 aa, Canis familiaris
MVAGMLMPRDQLRAVYEVLFREGVMVAKKDRRPRSLHPHVPGVTNLQVMRAMASLRARGLVRETFAWRHFYWYLTNEGIAHLRQYLHLPPEIVPASLQRVRRPVAMVMPARRIPHVQSVQGPLSCPPKWGPVPTEDPAHEERRVYRRKEPEEGASEPPVVPATTPGNLARPGPKPAPATDERDRVQKKTFTKWVNKHLIKAQRHISDLYEDLRDGHNLISLLEVLSGDSLPREKGRMRFHKLQNVQIALDYLRHRQVKLVNIRNDDIADGNPKLTLGLIWTIILHFQISDIQVSGQSEDMTAKEKLLLWSQRMVEGYQGLRCDNFTSSWRDGRLFNAIIHRHRPMLIDMSKVYRQTNLENLDQAFSVAERDLGVTRLLDPEDVDVPQPDEKSIITYVSSLYDAMPRVPDVQDGVKANELQLRWQEYRELVVLLLQWMRHHTAAFEEHRFPSSFEEIEILWCQFLKFKETELPAKEADKNRSKGIYQSLEGAVQAGQLKVPPGYHPLDVEKEWGKLHVAILDREKQLRSEFERLECLQRIVSKLQMEAGLCEEQLNHADALLQSDVRLLAASKAPQRAAEVERDLDKADGMIRLLFNDVQTLKDGRHPQGEQMYRRVYRLHERLVAIRTEYNLRLKSGVAAPVTQVTMQTTQRRPELEDATLRYLQDLLAWVEENQRRVDSAEWGGDLPSVEAQLGSHRGLHQSIDEFRAKIERARADEGQLSPAPRGTYRDCLGRLDLQYAKLLNSSKARLRSLESLHGFVAAATKELMWLSEKEEEEVGFDWGEHNSNMAAKKESYSALMRELEVKEKKIKEIQSTGDRLLREGHPARPTVESFQAALQTQWSWMLQLCCCIEAHLKENTAYFQFFSDVRETEEQLRKLQEMLRRKYICDRSITVTRLEDLLQDAQDEKEQLNEYRAHLSGLAKRAKAVVQLKPRDQAQPVRGLVPLQAVCDYKQVEVTVHKGDQYQLLGPAQPAHWKVLSSSGSEAAVPSVCFLVPPPNQEAQEAVSRLEAQHQALVALWHQLHVDMKSLLAWQCLSRDVQLIRSWSLVTFRTLKPEEQRQALRSLELHYQAFLRDSQDAGGFGPEDRLQAEREYGSCSRHYQQLLQSAEQGAQEESRCQRCISELKDIRLQLEACETRTVHRLRLPLDKEPARECAQRIAEQQKAQAEVEGLGKGVARLSAEAEKVLALPEPSPAAPTLRSELELTLGKLEQVRSLSAIYLEKLKTISLVIRSTQGAEEVLRAHEEQLKEAQAVPATLPDLEATKAALKKLRVQAEAQQPVFDALRDELRGAQEVGERLQRQHGERDVEVERWRERVAPLLERWQAALAQTDVRQRELEQLGRQLRYYRESADPLGTWLQDAKQRQERIQAVPLANSQAVREQLQQEKELLEEIERYGEKVDECQQLAKQYINAIKDYELQLVTYKAQLEPVASPAKKPKVQSGSESVIQEYVDLRTRYSELTTLTSQYIKFIRETLRRMEEEERLAEQQRAEERERLAEVEAALEKQRQLAEAHAQAKAQAEREAEELQRRMQEEVARREEAAVDAQQQKRSIQEELQHLRQSSEAEIQAKARQVEAAERSRVRIEEEIRVVRLQLEATERQRGGAEGELQALRARAEEAEAQKRQAQEEAERLRRQVQDESQRKRQAEAELALRVKAEAEAAREKQRALQALEDVRLQAEEAERRLRQAEADRARQVQVALETAQRSAEVELQSKRASFAEKTAQLERTLQEEHVAVAQLREEAERRAQQQAEAERAREEAEQELERWRLKANEALRLRLQAEEVAQQKSLAQAEAEKQKEEAEREARRRGKAEEQAVRQRELAEQELEKQRQLAEGTAQQRLVAEQELIRLRAETEQGEQQRQLLEEELARLQREAAAATHKRQELEAELAKVRAEMEVLLASKARAEEESRSTSEKSKQRLEAEASRFRELAEEAARLRALAEETKRQRQLAEEDAARQRAEAERVLAEKLAAISEATRLKTEAEIALKEKEAENERLRRLAEDEAFQRRRLEEQAAQHKADIEERLAQLRKASENELERQKGLVEDTLRQRRQVEEEILALKASFEKAAAGKAELELELGRIRSNAEDTLRSKEQAELEATRQRQLAAEEEQRRREAEERVQKSLAAEEEAARQRKSALEEVERLKAKVEEARRLRERAEQESARQLQLAQEAAQKRLQAEEKAHAFAVQQKEQELQQTLQQEQSMLERLRAEAEAARRAAEEAEEARERAEREAAQSRRQVEEAERLKQLAEEQAQAQAQAQAAAEKLRKEAEQEAVRRAQAEQAALKQKQVADAEMEKHKKFAEQTLRQKAQVEQELTTLRLQLEETDHQKSILDEELQRLKAEVTEAARQRNQVEEELFSVRVQMEELSKLKARIEAENRALILRDKDNTQRFLQEEAEKMKQVAEEAARLSVAAQEAARLRQLAEEDLAQQRALAEKMLKEKMQAVQEATRLKAEAELLQQQKELAQEQARQLQEDKEQMAQQLAQETQGFQRTLEAERQRQLEMSAEAERLKLRVAEMSRAQARAEEDAQRFRKQAEEIGEKLHRTELATQEKVTLVHTLEIQRQQSDHDAERLRAAITELEREKEKLQEEATLLQQKSEEMQVVQQEQLLQETRALQESFLSEKDRLLQRERFIEQEKAKLEQLFRDEVAKAQKLREEQQRQQQQMEQEREQLVASMEEARQCQREAEEGVRRKQEELQLLEQQRQQQERLLAEENQRLRERLQRLEEEHRAALAHSEEIAASQAAAAKALPNGRDAPDGPAVEAEPEHMFDGLRRKVPAQRLQEVGILSAEELQRLAQGRTTVAELAQREDVCQYLQGRGGIAGLLLKPANEKLSIYAALRRQLLSPGTALILLEAQAATGFLLDPVQNRRLTVNEAVKEGVVGPELHHKLLSAERAVTGYKDPYTGEQISLFQAMQKELIVRDHGIRLLEAQIATGGIIDPVHSHRLPVDVAYQRGYFDEEMNRVLADPSDDTKGFFDPNTHENLTYLQLLERCVLDPETGLRLLPLTDQAARGGELVYTDSEARDVFEKATVSAPFGKFQGRTVTIWELINSEYFTTEQRRDLLRQFRMGKVTVEKIIKIVITVVEEHEQKGQLCFEGLRALVPAAELLESGVIDHNLYRQLQRGERSVREVAEVDAVRRALRGTSVIAGVWLEETGQRLSIYEALKKDLLPPEVAVALLEAQAGTGHIIDPATSARLTVDEAVRAGLVGPELHEKLLSAEKAVTGYKDPYSGQSVSLFQALKKGLIPREQGLRLLDAQLSTGGIVDPSKSHRVPMDVAYARGYLDQETSRALSAPQDEAKTYHDPSTQEPVTYGQLQQQCRPDPLTGLSLLPLSEQAAQARREGLYSELQARETFQKTPVEVPVGSFKGRTVTVWELLSSEYFTTEQRQELLRQFRTGTVTVEKIIKIVITIVEEVETVRQERLSFSGLRAPVPASELLASGVLSRTQFEQLKDGKTSVKDLSELSSVRTLLQGSGCLAGIYLEESKEKVTIYEAMRRGLLRPSTATLLLEAQAATGFLIDPVRNQRLYVHEAVKAGVVGPELHEKLLSAEKAVTGYKDPYSGSTISLFQAMKKGLVLREHGIRLLEAQIATGGIIDPVHSHRLPVDVAYQRGYFDEEMNRVLADPSDDTKGFFDPNTHENLTYLQLLERCVEDPETGLRLLPLKGAEKTEVVESTQVYTEEETRRAFEETQIDIPGSAGRSGSTMSLWEVMQSDLIPEEQRTRLMADFQAGRVTKERMIIIIIEIIEKTEIVRQQNLASYDYVRRRLTAEDLYEARIISRETYSFLREGTKSLRQVLEEEEASRYLYGTGCVAGVYLPGSRQTLTIYQALKKGLLNAEVARFLLEAQAATGFLLEPVKGERLTVDEAVRKGLVGPELHDRLLSAERAVTGYRDPYTEQTISLFQAMKKDLIPTDEALRLLDAQLATGGIVDPHLGFHLPLEVAYQRGYLNKDTHDQLSEPSEVRSYLDPSTDERLSYTQLLRRCRRHETSGQMLLPLSDARKLTFRGLRKQITVEELVRSQVLDEATALQLQEGLTSVEEVTKNLQKFLEGTSCIAGVFVDATKERLSVYQAMKKGIIRPGTAFELLEAQAATGYVIDPIKGLKLTVEEAVRMGIVGPEFKDKLLSAERAVIGYKDPYSGKLISLFQAMKKGLILKDHGIRLLEAQIATGGIIDPEESHRLPVEVAYKRGLFDEEMNEILTDPSDDTKGFFDPNTEENLTYLQLMERCITDPQTGLCLLPLKEKKRERKTSSKSSVRKRRVVIVDPETGKEMSVYEAYRKGLIDHQTYLELSEQECEWEEITISSSDGVVKSMIIDRRSGRQYDIDEAIARNLIDRSALDQYRAGTLSITEFADMLSGNAGGFRSRSSSVGSSSSYPISPATSRTQAASWSDPTEETGPVAGILDTETLEKVSITEAMRRNLVDNITGQRLLEAQACTGGIIDPSSGERFPVTDAVSRGLVDKIMVDRINLAQKAFCGFEDPRTKTKMSAAQALKKGWLYYEAGQRFLEAQYLTGGLIEPDVPGRVPLDEALQRGMVDARTAQKLRDVGAYSKYLTCPKTKLKISYKDALDRSMVEEGTGLRLLEAAAQSSKGYYSPYSVSGSGSAAGSRSGSRTGSRAGSRRGSFDATGSGFSMTFSSSSYSSSGYGRRYASGPVSSLGGPESAAA

SEQ ID NO: 79 - DNA, 2283 bp, Trypanosoma cruzi
  CDS (1)..(2283)
atgttagagcagcgcatcatatccgtggagcggcgctctgctgcgatggagcgcgccatcattgctgcaatggaggaggtggatgaattgcgctcattattcttgacacgtatagatggcattcaacgtgtcgacgccttggaaaacacggcaaaggaaggtcgggacgccacccccgcgaagagcaaaaaaggtgacctggcgagtgtcccaaagaagccgcgtgtcggcgcagtgggcgagagaaaagaaaaagggaaaagtggcaggggaggggagtggtacaacaccccctgcagtgagctgacgctgcgccacctggaagaggtgatgcaattagcaaccgaggcaattgcggcatcggcagcgcagaaggagaagtcacatctgcatgaggtgcggcagagtgccctcgagaaggaggtggaggcgctgcactctcagctggagaggcgcactcaaggtgtggagcaacacacctcgcagcaggtgcaggagatggaaatgaaactacgcaaattggagaccaaaatgcagcggcaacgcgaagaattgatagatgaagtcctgaagcgccttcatggatttcgtgaagcatcgccactggaagggggcggcggcgaggagcttattcagaggctacaggagcgtgtttctcagcttgagctgaagcaggaggcgctacggagcctcgttgccacagaacttgatgcagtgatggaggaccgcgttaagagtattgctgaatcgcacctccagcaactcctacgtgaacagcagcaacagcagcagtggttgaagggtggcagcactgtgaacacgagcacacaagaaacgacagctaaaaacggtgttgcctctgctgctgccattgacccatcgcctgccgctgccggaccgctggattttcgcagccttcgcctcgacgtcgatgtgcttcgtcaggaccttgtccgctgtatcgtggagattgaaaaagtcatggatcagcagcaacgcctgggggttcgtgtgcacagctgcgtgagcaccgtgcaacgacaccaaaccgacattgacgggctctcggatcagcagaaaacgctgattcagtctcacatggcgcgccttgagactcagcaggccacagcaactgcgcggcaggaaaaacatttggccgcggagctggatgtgctgcacgcgaaggttctgtcggaagtgcgacgcgtccatgagcagcagaccgacatgattgtgcgatccgagcatcagcgactggatgatttggcggcggcgcaggagaggctgcgggatgaattgcgcgttgccgttgaaaagcagcgcgaggaggtgaggatggccatcgagcaggtttcagagaccgggcggcggttggagcgtgaattggcgtcccaactgcgaggtgagacagcgcggcaaattgacgcggcacggcaggctcaggaagtttccacagatgaaacacaacggcttctgcaggacacacaggaggaactccgacgaatgcagaacaatctgaaggacagcgccgtgctgatgcaagagcgaagccgacggtttgaggagtcgatggaaaatcggctcaataacgaggctcgccggattaagacgtttacgaatgacgcaacgttgcgactacagaagcaagtagaggatgaggtgcggcgccttgtgcatatcaccgagcaagagtctttgtcatctatgcagcatgaaatgcagcgtgtcaatgtcgctctgcaggccctggaagaggagcagcgggcgctccgtgaagggttgctcacgctatcggcaccctccagaacgatggcaagcctagatcaccgcatgaatgtgttgcaggaggatgttaggagtgtgtttgcccaaattgagcatgtgcaggatattggagcgcctgggctaacgaagcacgtgcttgccaagcagcagcgaatgctgcaggatgatatattagaagtgaaatcgagattgcgtcgctgcgaggagtgctgtggctacacaaatgttgtgccacagacgcaggagatggaactgtcacagaccttgagtggcaaggcgtttccccacattaccgtgacgcagccgaccaaattgacgacggaatcattaacgccggggaaaccaactttggggcaggcgagtgatgtcgctgcaggggtcgttcaaagcccaggtgtgccttacgggcttaatcaaggcaaactgatcaagggtacatcagagataaaccccttcagcagcacgttttatgatcctcttgctggtgtctttgactga

SEQ ID NO: 80 - protein, 760 aa, Trypanosoma cruzi
MLEQRIISVERRSAAMERAIIAAMEEVDELRSLFLTRIDGIQRVDALENTAKEGRDATPAKSKKGDLASVPKKPRVGAVGERKEKGKSGRGGEWYNTPCSELTLRHLEEVMQLATEAIAASAAQKEKSHLHEVRQSALEKEVEALHSQLERRTQGVEQHTSQQVQEMEMKLRKLETKMQRQREELIDEVLKRLHGFREASPLEGGGGEELIQRLQERVSQLELKQEALRSLVATELDAVMEDRVKSIAESHLQQLLREQQQQQQWLKGGSTVNTSTQETTAKNGVASAAAIDPSPAAAGPLDFRSLRLDVDVLRQDLVRCIVEIEKVMDQQQRLGVRVHSCVSTVQRHQTDIDGLSDQQKTLIQSHMARLETQQATATARQEKHLAAELDVLHAKVLSEVRRVHEQQTDMIVRSEHQRLDDLAAAQERLRDELRVAVEKQREEVRMAIEQVSETGRRLERELASQLRGETARQIDAARQAQEVSTDETQRLLQDTQEELRRMQNNLKDSAVLMQERSRRFEESMENRLNNEARRIKTFTNDATLRLQKQVEDEVRRLVHITEQESLSSMQHEMQRVNVALQALEEEQRALREGLLTLSAPSRTMASLDHRMNVLQEDVRSVFAQIEHVQDIGAPGLTKHVLAKQQRMLQDDILEVKSRLRRCEECCGYTNVVPQTQEMELSQTLSGKAFPHITVTQPTKLTTESLTPGKPTLGQASDVAAGVVQSPGVPYGLNQGKLIKGTSEINPFSSTFYDPLAGVFD

SEQ ID NO: 81 - DNA, 15231 bp, Rattus norvegicus
  CDS (1)..(14061)
atggtggctggcatgctcatgccactggaccagcttcgggccatctatgaggtgctctttcgtgagggggtgatggttgccaagaaggaccggcgaccccgaagcctgcatccccatgtgcccggcgtcaccaatctacaggtcatgcgtgccatgacctcgctgaaagctcggggcctggtgcgggagacctttgcctggtgccacttctactggtacctgaccaacgagggcatcgaccacctacgccagtacctacacctgccaccggagatcgtacctgcctctctgcagcgtgtgcgccgccctgttgccatggtgatgcctgcacgtcgtcgctccccccatgtgcagaccatgcaaggtcccttaggctgtccaccaaagaggggccctctgccagctgaggaccctgcccgggaggagcggcaggtctatcgcaggaaggagcgtgaggaaggggcacctgaaacccctgtggtgtctgccaccatcgtggggaccctggccaggcccggcccagagcccaccccagccacagatgaacgagaccgtgtgcagaagaaaacttccaccaagtgggtcaataaacaccttatcaaggctcaaaggcacatcagtgacctgtatgaagacctccgtgatggccacaacctcatctccctgctggaagtcctctcaggagacagcctgccccgagagaaggggaggatgcgtttccacaagctgcaaaacgttcagattgccctggactatctccgacatcggcaggtgaagttggtgaacatcagaaatgatgacatcgccgatggcaaccccaagctgaccctgggcctgatctggacaatcatcctgcacttcaagatctcagacattcaggtgagcggccagtccgaggacatgacagccaaggagaagctgctgctgtggtctcagcgtatggtagagggctaccaaggcctgcgctgtgacaacttcaccaccagctggcgcgacggccggctcttcaatgctatcatccacaggcacaagcccatgctcatagacatgaataaagtgtaccgacagaccaacctggagaacctagaccaggccttctccgtggcagagcgggacctgggagttaccaggctcctggacccagaagatgtggatgtccctcagcctgatgagaagtccatcatcacctacgtttcatccctgtatgatgccatgccccgtgtgccgggcgcacaggatggagtgagggccaatgagctgcagcttcgttggcaagagtaccgggagcttgtgctgctgctgctacagtggatccggcaccacaccgctgcttttgaggagcgcaagttcccctccagctttgaggagattgagatcctatggtgccagtttctgaagttcaaggagacagaacttcctgccaaggaggcagacaagaaccggtccaaaggcatctaccagtctttggagggagcagtacaagcaggccagctcaagattccccctggctaccacccgctagacgtggaaaaggagtggggcaagctgcacgtggccatcctggagcgggagaagcaactccggagcgagtttgagaggctggagtgtcttcagcgcattgtgagcaagctacagatggaggctgggctatgtgaggagcagctgtaccaggcggattccctactgcagtcggatattcggctgctggcctcaggcaaggcggcacagcgggctggggaagtggagagagacctggacaaggctgatggtatgatccggctgttgttcaatgatgtgcagacccttaaagatgggcggcatccacagggtgaacagatgtaccggagggtgtatcgtctgcatgagcgcctggtagccatccgcactgaatacaacctccggctgaaggcaggggtgggtgcccctgtgacccaggtgaccctgcagagcacacagaggcgcccagagctagaggactccacactgcgttacctgcacgacctgctggcatgggtggaggagaaccagcgtcgaatagacggtgctgagtggggcgtggacttgcccagtgtagaggcacagctgggcagccaccgaggcatgcatcagtctattgaggaattccgggccaagatcgagcgggctcggaatgatgagagccagctctcccctgccacccgaggtgcctaccgagactgcctgggccgcctggacctgcagtatgcaaagctgctgaactcctccaaggcccgcctccggtccctggagagcttgcatgggtttgtggcggcagctaccaaggagctgatgtggctgaatgagaaggaagaggaagaagtgggctttgattggagtgaccgcaacaccaacatggctgccaagaaagaaagttactcggccctgatgcgtgagctggagatgaaggaaaagaaaattaaggagatccagaacacgggggacaggttgctgcgggaagaccatcctgcccggcccacagtggagtccttccaggctgccctgcagacacagtggagctggatgctgcagctgtgttgctgcattgaagcgcacttgaaagagaacacagcctacttccagttcttctcagatgttcgggaggctgaggaacagttgcagaaactacaggagacgttacgcaggaagtacagctgtgaccgctccatcactgtcacaaggcttgaggacctgctgcaggatgcccaggatgagaaggagcaactgaatgagtacaaagggcacctctcaggcctggccaagcgggccaaggctattgtgcagctgaagccacgcaaccctgcccaccctgtgcggggtcacgtgcccctgctagctgtgtgtgactacaagcaggtggaggtgactgtgcacaagggtgaccaatgccagctggtgggccctgcacagccgttccactggaaggtgctcagtagttccggcagtgaggctgccgtgccttctgtgtgctttcttgtgccgccacccaaccaggaggcccaggaagctgttgctaggctggaggcccagcatcaggccctggttactctgtggcaccagcttcacgtggacatgaagagtcttctggcatggcagagcctcaatcgtgacatacagctcatccggtcctggtccctagtcacgttccgcacgctgaagcccgaggagcagcggcaagctctgcgcaacctggagttgcactaccaggccttccttcgagacagccaggacgctggtggctttgggcccgaggaccggctggtggcagagcgcgaatatggatcttgtagtcgccactaccagcagctgctacaaagcctggagcagggtgagcaggaagagtctcgctgtcagcgatgcatctcggagctcaaggacattcggctgcaactggaggcctgtgagactcggactgtgcaccgtctgcggctgccactggataaagaccccgcacgggagtgtgcccagcgcatcgctgagcaacagaaagcacaggctgaggtggaggggctgggcaagggagttgcccggctgtctgctgaggctgagaaagttctggccttgccagagccgtcacctgctgcaccaactctgcgctcggagttggaattgaccctgggcaagctggaacaggtcagaagcctgtctgccatctacttggagaaactcaagaccatcagcttggtaattcgcagtacccagggggctgaggaggtgcttaaaacacacgaggagcacctgaaggaggcccaggccgtgcctgccacactccaagagctcgaagtcaccaaggcttcactaaagaagctgcgggcccaggcggaggcacagcagcctgtattcaacaccctacgagatgagctgaggggggcacaggaagttggtgaacggctacagcagcggcatggtgagcgggacgtggaagtagagcgctggcgagaacgtgtcactcagttgctggagcgctggcaggctgtgctagcccagactgatgtgcggcagcgggagcttgaacagctgggccgccaacttcgctactaccgtgaaagtgcggatccgctgagctcctggctgcaggatgccaagagccggcaagaacagatccaggctgtgccaatagccaacagtcaggctgcacgagaacagctgcgccaggagaaggccctgctggaggagattgagcgccatggtgagaaggttgaggagtgccagaagtttgctaagcagtacatcaatgcaatcaaggactatgagctccagctgatcacctacaaggctcagcttgaacctgtggcctcccccgccaagaagcccaaggttcagtctggatcggagagcgtcatccaggagtacgtggatctgcgtacacgctacagtgagctgaccacactcacgagtcagtacatcaagttcatcagtgagacactgcgccgcatggaagaggaagagcggctggctgagcaacagcgggcagaggagcgggagcgcctggccgaggtggaggccgcgctggagaagcagcggcagctggctgaggcccatgcccaggccaaggcacaggccgagctggaggcacgagaactgcagcggcgcatgcaggaggaggtgacgcggcgcgaggaggcggcggtggacgcacagcaacagaagcgcagcatccaagaggagctgcagcatctgcggcaaagctcagaggcagagatccaggccaaggcccagcaggtggaggctgcagagcgcagccgcatgcgcattgaggaagagatccgcgtagtccgtctgcagctagagacaactgagcgtcagcgtggaggggcggaggatgagctgcaggctctgcgtgcacgggctgaggaggcagaagcacagaagcggcaggctcaggaggaagccgagcgcttgcggaggcaggtgcaggatgagagccaacgcaaacggcaggcggaggccgagctggccctgcgtgtgaaggcagaagcggaggcagcgcgagagaagcagcgggccctgcaggctctggatgaactgaaactgcaggccgaggaggccgaacggtggctgtgccaagccgaggcagagagggctcgccaagtgcaggtagccctggagacagcgcagcgtagtgcagaagtggagctgcagagcaagcgtccgtcctttgcagagaagaccgcacagttggagcgcacgctgcaggaagagcacgtgacagtgacacagctgcgggaggaggcggaacggcgggcacagcagcaggctgaagccgagcgagcccgtgaggaagccgagcgggagctggagcgctggcagctgaaggccaatgaggcgctgcggctgcggctgcaggcagaggaggtggcacagcagaagagcctggcccaggccgatgcggagaagcagaaggaagaggcagaacgggaagcccggcggcggggcaaggcagaggagcaggccgtgcggcagcgagagctggctgagcaggagctggagaagcagcggcagctgacagagggcaccgcccagcagcgcctggctgccgagcaggagctgattcgcctgcgggcagagacggagcaaggtgagcatcagcggcagctgctggaggaagagctggcccggctacagcacgaagcgacagcagccacacagaagcgccaggagctggaggctgagctggcgaaggttcgggcagagatggaggtactgctggccagcaaggcacgagccgaagaggagtctcgctccaccagtgaaaagtccaagcagaggctggaagctgaggcagggcggtttcgagagctggctgaggaggctgcccgcctgcgtgctctggccgaggaggcaaggcggcaccgggagttggccgaggaggacgcggcacgccagcgggccgaggcggacggagtgcttacggagaagctggctgccatcagtgaggccacaaggctcaagacggaggcagagattgcactcaaagagaaggaggccgagaacgagcgcctgaggcgcctggctgaagatgaggccttccagcggcgccggctggaggagcaggcagcacagcacaaggcagacatagaggagcgcctggcccagctgcgcaaggcatccgagagcgagctggagcgacagaaggggttggtggaggataccctgcggcagcggcggcaggtggaggaggagatcatggctctgaaggcgagcttcgagaaggccgcggctggcaaggcagaactggagctggagcttggccgcatccgcagcaatgccgaggacaccatgcgcagcaaggagctggccgagcaggaggcagcgcggcagcggcagttggcagctgaggaggagcagaggcgccgggaagccgaggagcgggtgcagaggagcctggcagcggaggaggaagccgcacggcagcgcaaggtcgcactggaggaagtcgagcggctcaaggccaaggttgaggaagcgcggcgcctgcgagagcgagctgagcaggagtctgcgaggcagctgcagctggcccaggaggctgcccagaaacggctgcaggcggaggagaaggcgcacgcctttgtggtgcagcagcgagaagaggagctgcagcagactcttcagcaagagcagaacatgctggagcggctgcggagcgaggcagaggcagcgcggcgagctgctgaggaggcggaggaggcccgggagcaggcagaacgtgaggcagcgcagtctaggaagcaagtggaagaggccgagcggctgaagcagtcggcagaggagcaggctcaggcccaggcccaggcgcaggcggctgcagagaaactgcgcaaggaagcggagcaggaggcggcgcgtcgggcccaggcggagcaggctgcgttgaaacagaagcaggcagccgacgcggagatggagaagcacaagaagtttgcagagcagacgctacggcagaaggctcaggtagagcaggagctgaccacgctgaggctgcagctcgaggagaccgaccaccagaagagcatcctggatgaggagctgcagcggctaaaggctgaggtaacagaggcagcccggcagcgtagccaggtagaggaggagctcttctctgtccgcgtgcagatggaggagctgggcaaactcaaggctcgcattgaagctgaaaaccgggcactcatccttcgtgacaaggacaacacacagcgcttcctggaggaggaggccgagaagatgaaacaggtggcagaggaagctgcacggttgagcgtagctgcccaggaggcagcaaggctgcggcagctagccgaggaggacctggcccagcagcgggccctggcggagaagatgctgaaggagaagatgcaggcggtgcaggaagccacaaggctcaaggctgaggctgagctgctgcagcagcagaaggagctggcacaggagcaggcccggcggctgcaggcggacaaggagcaaatggctcagcagttggtagaggagacacagggtttccagcggaccctggaggctgagcggcagcggcagctagaaatgagcgcagaggctgaacgcctcaagttgcgcatggctgagatgagccgggctcaggcccgtgcagaggaggatgcccagcgcttccggaagcaggctgaagagatcggcgaaaagctgcaccgcactgaactcgctacacaggagaaggtgacattggtgcagactctcgagatccagcgacagcagagtgaccaagatgccgagcgtctgagggaggccattgctgagctggagcgtgagaaggagaagctcaagcaggaggcgaagttactgcagctcaagtctgaggagatgcagactgtgcagcaggagcagatactgcaggagacacaggccctgcagaagagctttctctctgagaaggacagcttgctgcaacgcgaacgcttcatcgagcaggagaaggccaagctggagcagcttttccaggacgaggtggcaaaagcaaaacagctgcaggaggagcagcagcggcagcagcagcagatggagcaggaaaagcaggagctggtggccagcatggaggaggcccggaggcggcagcgtgaggcagaggagggtgtgaggcgcaagcaagaggaactgcagcgtctggagcagcagcggcagcagcaggagaaactactggcagaggagaaccagaggctgcgggagcggctgcagcgcctggaggaagagcaccgagctgcgttggcgcactctgaggagatcgccacctcccaggctgctgccacaaaagcactgcccaatggccgcgacgcacttgatggcccctccatggaggccgagcccgagtacacctttgagggattacgtcagaaggtgccagctcagcagctacaggaagcaggcattctgagcatggaggaactgcagcgtttgacacagggtcacaccacggtggctgagctcacgcagcgggaagatgtgcgccactacctgaagggcggcagcagcatcgcaggattgctcctgaagcccaccaatgagaaactgagtgtctacacagccctacagcggcagctgctcagccctggaacagcccttatcttacttgaggcccaggcagcctcgggcttcctgctggaccctgtccggaaccggcggctgacggtcaatgaggctgtgaaggagggtgtggtgggtcccgagctgcaccacaagctgctgtcagctgagcgtgccgtcactggctacaaggacccttacacaggagaacagatctctctcttccaggccatgaagaaggacctcattgtcagggaccatggcatccgcctgctggaagcccagatcgccacaggtggcatcattgaccctgtacacagccaccgtgttcccgtggacgtggcctaccagcgtggctacttcgatgaggagatgaaccgtgtgctggctgacccaagcgatgacaccaagggcttctttgaccccaacactcacgagaacctcacgtacctgcagctgctggagcgctgtgtggaggaccccgagacaggcctgcgcctcctgccactcacagacaaggctgccaagggtggtgagctggtgtacactgacacggaggcccgtgacgtcttcgaaaaggccacagtgtctgcaccattcggcaagttccagggcaagaccgtgaccatctgggagatcatcaactcagagtacttcacagcggagcagcgacgggacctgctccggcagttccgcacgggccgcatcacggtggagaagatcatcaagattgtcatcacggtggtagaggaacacgagcggaagggccagctctgctttgagggcctccgtgcccttgtgcctgctgcagagctgctggacagtggagtcatcagtcatgaagtctaccagcagctgcagcggggtgagcgctctgtgcgggaagtggccgaggcagacgaggtgaggcaggccctgcggggtaccagtgtcattgccggtgtgtggctggaagaagcagggcagaagctgagcatctatgaggccctgaggagagatttgctgcagccagaggtggctgtggccttgctggaggcccaggctggcactgggcacatcattgaccctgccacgagtgccaggctgactgtggatgaggcagtgcgtgctggcctggtgggtcctgagatgcacgagaagctcttgtcagctgagaaggctgtaacaggctatagggatccctactcgggacagagcgtctcgctcttccaggctctgaagaagggtctcatcccccgagaacagggcctgcgcctgctggatgcccagttatccactggtggcattgtagaccccagcaaaagccaccgtgtgcccctggatgttgcctatgcccggggctacctggacaaagagactaacagggccctgacgtcacccagagacgatgccagagtctaccttgaccccagcacccgggagccagtcacctacagccagctccaacagcggtgccggtctgaccagctgactgggttgagcctactgcccctctcagagaaggccgtccgggcccggcaggaagaggtctactctgagctccaggcccgtgagacattggagaaggccaaggtggaggttcctgtgggcggctttaagggcagggcgctgacagtgtgggagctcataagctcggaatacttcactgaggagcagcggcaggagctgctacggcagttccgcacaggcaaggtcactgtagagaaggtcatcaagattcttatcaccattgtggaggaggtggagactcaacggcaggagagactgtccttcagtggcctccgtgcccctgtgccggccagtgagctcctggcctccaagatcctcagcagaactcagtttgagcagctcaaggatggcaagacatcagtcaaagatctgtcagaggtgggctctgtgcggacactgctgcaaggcagcggctgcctggctggcatctatctggaggactcgaaggagaaagtaaccatctatgaggccatgcgccggggcctcctcagagccagcacagccacactcctgctggaggcccaggcggccactggttttctagtggaccctgtgcggaaccaacgtctgtacgtccatgaagctgtcaaggctggagtggtgggcccggagctccatgagaagctgctgtcggctgagaaggcggtcactggttacaaagatccctactctggcagcaccatctcgctgttccaggccatgaagaagggcttggtcctcagggaccatgccatccgcctgctggaggcccagattgccacaggtggcatcattgaccctgtgcacagtcaccgccttcccgtagatgttgcctaccagcgtggctacttcgatgaggagatgaaccgtgtgctggctgacccaagtgatgacaccaagggcttcttcgaccccaacacccacgagaacctcacgtacctgcagctgctggagcgctgcgtggaggaccccgagacaggcctgcgcctcctgccactcagaggggcagagaagacagaggtggtagaaaccacacaggtgtatactgaggaggagactcggagggcgttcgaggagacgcagattgacatcccaggtggtggcagccacggtggctcctccatgtctctatgggaggtgatgcagtcagacatgatcccagaggaccagcgtgcccggctcatggccgactttcaggctggcagagtgaccaaggagcgcatgatcattatcatcatcgaaatcattgagaagacggagatcatccgccagcagaacctcgcctcctatgactacgtacgccgccgcctcaccgccgaagacctgtatgaggcccggatcatctcccttgagacctacaacctcttccgggaaggcaccaagagcctccgtgaggttctggagatggaatctgcctggcgctacctttacggcacaggatcggtggccggtgtctacctgcctggctctaggcagacgctaaccatctaccaggcccttaagaaggggctgctgagtgccgaggtggcccgcttgctgctggaagcacaggcagccacaggctttctgctggacccagtgaaaggcgagaggctgactgtggacgaggccgtgcggaagggtctggtaggccccgagctgcacgatcggctcctctctgccgagcgagctgtaactggctaccgagacccctacaccgaacagcccatctcactcttccaggccatgaagaaggagctgatccctgccgaggaggcactgaggctgctggatgctcagctagccacaggaggcattgtggacccccgcctgggtttccacctccccctggaggtggcttaccaacgaggctacctcaataaggacacgcatgaccagttgtcagagcccagtgaggtgcgcagctatgtggacccctccacggatgagcgtctcagctacacacagctgctcaagcgttgccgccgtgacgacaacagcggccagatgctgctgccgctctctgatgcccgcaagctgaccttccgcggcctgcgcaagcagatcaccgtggaggagctggtacgctctcaggtcatggatgaggccacagcactgcagctgcaagaaggcctgacctccattgaggaggtcactaagaacctgcagaagttccttgagggtaccagctgcattgctggagtctttgttgatgctaccaaggaacggctgtcggtgtaccaggccatgaagaagggcatcatccgtcccgggacagccttcgagctcctggaagcgcaggcagccaccggctacgtcattgaccctatcaaggggctcaagctgactgtggaagaggccgtgcgcatgggtatcgtgggccccgagttcaaggacaagctgctgtctgctgagcgtgccgtcactggctacaaggacccttactctgggaaactcatctctctcttccaggccatgaagaagggcctgatcctgaaggaccatggcatccgcctgctagaggctcagatcgccaccggtggcatcattgaccctgaggagagccaccgcctgcctgtggaagtggcctataagcgtggtctctttgatgaggagatgaacgagatcctgactgacccctcagatgacaccaagggcttcttcgacccaaacaccgaggagaacctcacatacctgcagctgatggagcgctgtatcactgacccccagactggcctgtgtctcctgccgctgaaggaaaagaagcgggagcggaagacgtcctccaagtcctcagtgcgcaagcgccgcgtggtgattgtggaccctgagacgggcaaggagatgtcagtgtatgaggcctaccgcaagggcctcatagaccaccagacatacctggagttgtcagagcaggagtgcgagtgggaagaaatcaccatctcttcctcggacggcgtcgtcaaatctatgatcatcgaccgccgctctggccgccagtatgacattggtgacgccatcaccaagaacctcattgaccgctcagcactggaccagtaccgcgctggcacactttctatcaccgagtttgccgacatgctctcaggcaacgctggtggcttccgctcccgctcctcctctgtgggctcatcttcctcctaccccatcagttctgctgtccctaggacccagctagcctcctggtctgatcctactgaggagactggcccagtggccggcatcctagacacagagactctggagaaggtgtccatcacagaggccatgcaccgcaacctggtagacaacatcactggccagcggttgctggaggcacaggcctgcaccgggggcatcattgaccccagcactggtgagcgcttcccggtcactgaggctgtcaacaagggcctggtggacaagatcatggtagaccgtatcaatctggcccagaaggccttctgtgggtttgaggacccacgcaccaagaccaagatgtcagctgcccaggccctgaagaagggctggctttactacgaggcaggccagcgtttcctcgaggtgcagtacctgacgggtggtctgattgagcctgacacacctggccgtgtgtctcttgatgaagccttgcaacgtggcactgtggatgcccgcacagcccagaagctgcgtgatgtcagtgcctactccaagtacctcacgtgccccaagaccaagctcaagatctcttacaaggacgctctggatcggagcatggtggaggagggcacagggctgaggctgctggaagccgcggcacagtccagcaagggctactacagcccgtacagtgtcagtggctctggctctactgctggttcacgcactggttcacgcaccggctccagggccggctcccgtcgtggcagctttgatgccactggctctggcttctccatgaccttttcttcttcctcctactcttcctcaggctatggccgccgctatgcctcagggccttcagcctctcttgggggccctgagtctgcagtggcctgatcccccagcctgtatcctgccttcccgctctgcatgtcgccaggctccccgtggaggcgctggggtcttttctttcttcttctttttttttttttttttaacatttaaaggtgtcttcctcccaagcggtgcctaaaatctaaccaaaaagaccagaataacacattaatatatatatatatatgcgatgtccagacagcctgtgtcttgggaaacagggctggcccaggcccagtgaccactccactctccttgggcctccctaatcctttctacctgccactcaccacagctaggtgccttggagaatccagagctgggcactcagcccactactcctgtctctcctgggaggattgccatctgggaaaggcccccagacctctaagccaaccccactggatgtctacctgctggtcctagctgctgaggggaactggggacggtcctgtgagcagacagctgttgagtctcttgaggcctctgccctgagccagctgcttctccccagtgtatacctgaatattcagtgggttttgctggcaaaggaaagatcccaggccaaccatctcttccagcctgcccagagaagccccttccccatgggaagataaggcctggtcctggccccagcctcccgcctggctcctgcagctgccattggagctgtgctttgtagctcactaccccatacttattcccttgagacctgagcctctgcttcagccttccagcctcaactccccttgtaagtgccttctgtgtccttgtacccaggccctaaagacccagacccagggcaagagatggacattctggctgggcggggctggagggttctgcagatctgagaattccttctccagaggcccagggtcttcaagcctgtggaacccctctgggtgctgctgcccaccccactcccagggagccctggccagcccagctgtgctaacataagtacttggccagtgacactctcccttccctggccttggtggctcctacccctgcctccaccctctgagtgagctttgcatgttccactaaccttgagctggtgacaggtggagatgccaggcagaacactaacctgaccatgggcgggggccctgcggtgtccgcccctcaataaaagcaattccaaccttaaaaaaaaaaaaaaaa

SEQ ID NO: 82 - protein, 4687 aa, Rattus norvegicus
MVAGMLMPLDQLRAIYEVLFREGVMVAKKDRRPRSLHPHVPGVTNLQVMRAMTSLKARGLVRETFAWCHFYWYLTNEGIDHLRQYLHLPPEIVPASLQRVRRPVAMVMPARRRSPHVQTMQGPLGCPPKRGPLPAEDPAREERQVYRRKEREEGAPETPVVSATIVGTLARPGPEPTPATDERDRVQKKTSTKWVNKHLIKAQRHISDLYEDLRDGHNLISLLEVLSGDSLPREKGRMRFHKLQNVQIALDYLRHRQVKLVNIRNDDIADGNPKLTLGLIWTIILHFKISDIQVSGQSEDMTAKEKLLLWSQRMVEGYQGLRCDNFTTSWRDGRLFNAIIHRHKPMLIDMNKVYRQTNLENLDQAFSVAERDLGVTRLLDPEDVDVPQPDEKSIITYVSSLYDAMPRVPGAQDGVRANELQLRWQEYRELVLLLLQWIRHHTAAFEERKFPSSFEEIEILWCQFLKFKETELPAKEADKNRSKGIYQSLEGAVQAGQLKIPPGYHPLDVEKEWGKLHVAILEREKQLRSEFERLECLQRIVSKLQMEAGLCEEQLYQADSLLQSDIRLLASGKAAQRAGEVERDLDKADGMIRLLFNDVQTLKDGRHPQGEQMYRRVYRLHERLVAIRTEYNLRLKAGVGAPVTQVTLQSTQRRPELEDSTLRYLHDLLAWVEENQRRIDGAEWGVDLPSVEAQLGSHRGMHQSIEEFRAKIERARNDESQLSPATRGAYRDCLGRLDLQYAKLLNSSKARLRSLESLHGFVAAATKELMWLNEKEEEEVGFDWSDRNTNMAAKKESYSALMRELEMKEKKIKEIQNTGDRLLREDHPARPTVESFQAALQTQWSWMLQLCCCIEAHLKENTAYFQFFSDVREAEEQLQKLQETLRRKYSCDRSITVTRLEDLLQDAQDEKEQLNEYKGHLSGLAKRAKAIVQLKPRNPAHPVRGHVPLLAVCDYKQVEVTVHKGDQCQLVGPAQPFHWKVLSSSGSEAAVPSVCFLVPPPNQEAQEAVARLEAQHQALVTLWHQLHVDMKSLLAWQSLNRDIQLIRSWSLVTFRTLKPEEQRQALRNLELHYQAFLRDSQDAGGFGPEDRLVAEREYGSCSRHYQQLLQSLEQGEQEESRCQRCISELKDIRLQLEACETRTVHRLRLPLDKDPARECAQRIAEQQKAQAEVEGLGKGVARLSAEAEKVLALPEPSPAAPTLRSELELTLGKLEQVRSLSAIYLEKLKTISLVIRSTQGAEEVLKTHEEHLKEAQAVPATLQELEVTKASLKKLRAQAEAQQPVFNTLRDELRGAQEVGERLQQRHGERDVEVERWRERVTQLLERWQAVLAQTDVRQRELEQLGRQLRYYRESADPLSSWLQDAKSRQEQIQAVPIANSQAAREQLRQEKALLEEIERHGEKVEECQKFAKQYINAIKDYELQLITYKAQLEPVASPAKKPKVQSGSESVIQEYVDLRTRYSELTTLTSQYIKFISETLRRMEEEERLAEQQRAEERERLAEVEAALEKQRQLAEAHAQAKAQAELEARELQRRMQEEVTRREEAAVDAQQQKRSIQEELQHLRQSSEAEIQAKAQQVEAAERSRMRIEEEIRVVRLQLETTERQRGGAEDELQALRARAEEAEAQKRQAQEEAERLRRQVQDESQRKRQAEAELALRVKAEAEAAREKQRALQALDELKLQAEEAERWLCQAEAERARQVQVALETAQRSAEVELQSKRPSFAEKTAQLERTLQEEHVTVTQLREEAERRAQQQAEAERAREEAERELERWQLKANEALRLRLQAEEVAQQKSLAQADAEKQKEEAEREARRRGKAEEQAVRQRELAEQELEKQRQLTEGTAQQRLAAEQELIRLRAETEQGEHQRQLLEEELARLQHEATAATQKRQELEAELAKVRAEMEVLLASKARAEEESRSTSEKSKQRLEAEAGRFRELAEEAARLRALAEEARRHRELAEEDAARQRAEADGVLTEKLAAISEATRLKTEAEIALKEKEAENERLRRLAEDEAFQRRRLEEQAAQHKADIEERLAQLRKASESELERQKGLVEDTLRQRRQVEEEIMALKASFEKAAAGKAELELELGRIRSNAEDTMRSKELAEQEAARQRQLAAEEEQRRREAEERVQRSLAAEEEAARQRKVALEEVERLKAKVEEARRLRERAEQESARQLQLAQEAAQKRLQAEEKAHAFVVQQREEELQQTLQQEQNMLERLRSEAEAARRAAEEAEEAREQAEREAAQSRKQVEEAERLKQSAEEQAQAQAQAQAAAEKLRKEAEQEAARRAQAEQAALKQKQAADAEMEKHKKFAEQTLRQKAQVEQELTTLRLQLEETDHQKSILDEELQRLKAEVTEAARQRSQVEEELFSVRVQMEELGKLKARIEAENRALILRDKDNTQRFLEEEAEKMKQVAEEAARLSVAAQEAARLRQLAEEDLAQQRALAEKMLKEKMQAVQEATRLKAEAELLQQQKELAQEQARRLQADKEQMAQQLVEETQGFQRTLEAERQRQLEMSAEAERLKLRMAEMSRAQARAEEDAQRFRKQAEEIGEKLHRTELATQEKVTLVQTLEIQRQQSDQDAERLREAIAELEREKEKLKQEAKLLQLKSEEMQTVQQEQILQETQALQKSFLSEKDSLLQRERFIEQEKAKLEQLFQDEVAKAKQLQEEQQRQQQQMEQEKQELVASMEEARRRQREAEEGVRRKQEELQRLEQQRQQQEKLLAEENQRLRERLQRLEEEHRAALAHSEEIATSQAAATKALPNGRDALDGPSMEAEPEYTFEGLRQKVPAQQLQEAGILSMEELQRLTQGHTTVAELTQREDVRHYLKGGSSIAGLLLKPTNEKLSVYTALQRQLLSPGTALILLEAQAASGFLLDPVRNRRLTVNEAVKEGVVGPELHHKLLSAERAVTGYKDPYTGEQISLFQAMKKDLIVRDHGIRLLEAQIATGGIIDPVHSHRVPVDVAYQRGYFDEEMNRVLADPSDDTKGFFDPNTHENLTYLQLLERCVEDPETGLRLLPLTDKAAKGGELVYTDTEARDVFEKATVSAPFGKFQGKTVTIWEIINSEYFTAEQRRDLLRQFRTGRITVEKIIKIVITVVEEHERKGQLCFEGLRALVPAAELLDSGVISHEVYQQLQRGERSVREVAEADEVRQALRGTSVIAGVWLEEAGQKLSIYEALRRDLLQPEVAVALLEAQAGTGHIIDPATSARLTVDEAVRAGLVGPEMHEKLLSAEKAVTGYRDPYSGQSVSLFQALKKGLIPREQGLRLLDAQLSTGGIVDPSKSHRVPLDVAYARGYLDKETNRALTSPRDDARVYLDPSTREPVTYSQLQQRCRSDQLTGLSLLPLSEKAVRARQEEVYSELQARETLEKAKVEVPVGGFKGRALTVWELISSEYFTEEQRQELLRQFRTGKVTVEKVIKILITIVEEVETQRQERLSFSGLRAPVPASELLASKILSRTQFEQLKDGKTSVKDLSEVGSVRTLLQGSGCLAGIYLEDSKEKVTIYEAMRRGLLRASTATLLLEAQAATGFLVDPVRNQRLYVHEAVKAGVVGPELHEKLLSAEKAVTGYKDPYSGSTISLFQAMKKGLVLRDHAIRLLEAQIATGGIIDPVHSHRLPVDVAYQRGYFDEEMNRVLADPSDDTKGFFDPNTHENLTYLQLLERCVEDPETGLRLLPLRGAEKTEVVETTQVYTEEETRRAFEETQIDIPGGGSHGGSSMSLWEVMQSDMIPEDQRARLMADFQAGRVTKERMIIIIIEIIEKTEIIRQQNLASYDYVRRRLTAEDLYEARIISLETYNLFREGTKSLREVLEMESAWRYLYGTGSVAGVYLPGSRQTLTIYQALKKGLLSAEVARLLLEAQAATGFLLDPVKGERLTVDEAVRKGLVGPELHDRLLSAERAVTGYRDPYTEQPISLFQAMKKELIPAEEALRLLDAQLATGGIVDPRLGFHLPLEVAYQRGYLNKDTHDQLSEPSEVRSYVDPSTDERLSYTQLLKRCRRDDNSGQMLLPLSDARKLTFRGLRKQITVEELVRSQVMDEATALQLQEGLTSIEEVTKNLQKFLEGTSCIAGVFVDATKERLSVYQAMKKGIIRPGTAFELLEAQAATGYVIDPIKGLKLTVEEAVRMGIVGPEFKDKLLSAERAVTGYKDPYSGKLISLFQAMKKGLILKDHGIRLLEAQIATGGIIDPEESHRLPVEVAYKRGLFDEEMNEILTDPSDDTKGFFDPNTEENLTYLQLMERCITDPQTGLCLLPLKEKKRERKTSSKSSVRKRRVVIVDPETGKEMSVYEAYRKGLIDHQTYLELSEQECEWEEITISSSDGVVKSMIIDRRSGRQYDIGDAITKNLIDRSALDQYRAGTLSITEFADMLSGNAGGFRSRSSSVGSSSSYPISSAVPRTQLASWSDPTEETGPVAGILDTETLEKVSITEAMHRNLVDNITGQRLLEAQACTGGIIDPSTGERFPVTEAVNKGLVDKIMVDRINLAQKAFCGFEDPRTKTKMSAAQALKKGWLYYEAGQRFLEVQYLTGGLIEPDTPGRVSLDEALQRGTVDARTAQKLRDVSAYSKYLTCPKTKLKISYKDALDRSMVEEGTGLRLLEAAAQSSKGYYSPYSVSGSGSTAGSRTGSRTGSRAGSRRGSFDATGSGFSMTFSSSSYSSSGYGRRYASGPSASLGGPESAVA

SEQ ID NO: 83 - DNA, 13350 bp, Cricetulus griseus
  CDS (1)..(13350)
atgcgtttccacaagctgcagaatgttcagattgccctggactatctccgacatcgccaggtgaagttagtgaacatcagaaatgatgacattgctgatggcaaccccaagctgacccttggcctgatctggaccatcatcctccacttccagatctcagacattcaggtgagcgggcagtcggaggacatgactgcaaaggaaaagctgctgctctggtcacagcgtatggtagagggctaccaaggcctgcgttgtgacaacttcaccaccagttggcgtgatggtcgtctcttcaatgctatcatccaccggcacaagcccatgctcattgacatgaacaaagtgtatcgtcagaccaacctggagaacctcgaccaggccttctccgtagcagagcgggacctgggagtcacaaggctcctggacccagaagatgtggatgtccctcagcccgatgagaagtctatcatcacctatgtttcatccctgtatgacgccatgccccgtgtgcccggcgcacagaatggggtgagggccaatgagctgcagctccgctggcaggagtaccgggagcttgtgttgctgcttctgcagtggatccggcaccatacagctgcctttgaggagcgcaagttcccctccagctttgaagagattgagatcctgtggtgccagtttttgaagttcaaggagacagagctcccggccaaggaggcagacaagagccggtccaaaggcatctaccagtctttggagggggcagtacaagcaggccagctccagatccctcctggcttccacccgctggacgtggaaaaggaatggggcaagctgcacgtggccatcctggagcgggagaagcagctccggggcgagtttgagaggctggagtgtcttcagagaatcgtcagcaaactgcagatggaggctgggctgtgtgaggaacagctgaaccaggccgactccctgctgcagtcggatattcggctgctggcctcaggcaaggtggctcagcgggctggggaagtggagcgagacctggacaaggctgatggcatgatccggctgttgttcaacgatgtgcagacccttaaagatgggcggcacccacagggtgaacagatgtaccggagggtgtatcgtctgcatgagcgcctggtagccatccgcactgagtacaacctccggctgaaggcaggagtggctgcccctgtgacccaggtgaccgtgcagagtacacagaggcgcccagagctggaggactctacactccgctacctgcaagacctgctggcgtgggtggaggagaaccagcgtcggatagacagtgctgagtggggtgtggacttgcccagcgtggaggcgcagctgggcagccaccggggcatgcatcagtctattgaggagtttcgggccaagatcgagcgggctcggaacgatgagagccagctctccccagccacccggggtgcctaccgagagtgcctgggccgcctagacctgcagtatgcaaagctgctgaactcctccaaggcccgcctccggtccctggagagcttgcacgggtttgtggcggctgccaccaaggagttgatgtggctgaatgagaaggaagaagaggaagtgggctttgattggagtgaccgaaacaccaacatggctgccaagaaggagagctactcggccctgatgcgtgagctggagatgaaggaaaagaaaatcaaggagacccagaacactggagaccggctgctgcgggaggaccaccacgcgcggcccacagtggagtccttccaggccgccctgcagacccagtggagctggatgctgcagctgtgctgctgcattgaggcacacttgaaagagaacaccgcctacttccagttcttctcagacgttcgggaggcggaggaacagctgcagaagcttcaggagaccatgcgcagggagtacagctgcgaccgctccatcaccgtcaccaggctggaggacctgctgcaggacgcccaggacgagagggagcagctgaatgagtacaaggggcacctctcaggcctggccaagcgggccaaggccattgtgcagttgaagccacgcaaccctgcccaccctgtgcggggccatgtgcccctgatggcggtgtgtgattataagcaggtggaggtgactgtgcacaagggtgaccagtgccagctcgtgggccctgcccagccgtcccactggaaggtgctccgcggacccagcagtgaggcggccgtgccctcggtgtgctttcttgtgccgccgcccaaccaggaggcccaggaagctgtcgctaggctggaggcccagcatcaggccctggtcacactgtggcaccagctgcatgtggacatgaagagccttctggcatggcagaatctcagtcgtgacatacagctcatccggtcctggtccctggtcacgttccgcacgctgaagccagaggagcagcgccaggccctgcgcaacctggagctgcactaccaggccttccttcgagacagccaggacgctggcggcttcgggcccgaggaccggctggtggcagagcgggagtacggatcttgcagccgccactaccagcagttactacaaagcctggagcagggcgagcaagaggagtctcgttgtcagcgatgcatctcggagctcaaggatattcggctgcaactggaggcctgtgagacccggaccgtgcaccgtctgcggctgcctctggacaaagagcctgcacgggagtgtgcccaacgcatcgctgagcagcagaaagcgcaagctgaggtggaagggctgggcaagggagtcgcccgcctctctgctgaggcggagaaagttctagcgctgccggaaccatcacccgctgctcccaccctgcgctcagagctggaactgaccctgggcaagctggagcaggtccgaagcttgtctgccatctacttggagaaactcaagaccatcagcttggtaattcgcagtacccagggggcggaggaggtgctcaaagcccacgaggagcagctcaaggaggcgcaggctgtgcctgccacgctccaagagcttgaagccaccaaggcctcactaaagaaactgcgggcccaggcagaagcacagcagcctgtattcgacaccctaagggatgagctgcggggggcacaggaagttggcgagcggctgcagcagcggcacggagagcgggacgtggaagtggagcgctggcgagagcgtgtcaatcagctgctggagcgctggcaggccgtgcttgcccagattgacgtgcggcagcgtgagctagaacagctggggcgccagcttcgctactaccgcgagagcgctgacccactgagctcctggctgcaggatgccaagaggcggcaagagcagatccaggctgtgccaatacccaacagccaggctgcacgggagcaactgcgccaggagaaggccctgctggaagagattgagcgtcacggtgagaaggtggaggagtgccagaagttcgccaagcagtacatcaacgccatcaaggactatgagctccagctggtcacctacaaggcacagcttgaacccgtggcctccccagccaagaagcccaaggttcagtctggatcggagagtgtcatccaagagtatgtggatctgcggacacgctacagtgagctgaccacactcacaagtcagtacatcaagttcatcagcgagaccctgcgccgcatggaagaggaagagaggctggctgagcaacagcgggcagaggagcgtgagcgactggctgagggagaggctgcgctggagaagcagcggcagctagctgaggcccacgcccaggctaaggcccaggcagagctggaggcgcaggagctgcagcggcgcatgcaggaggaggtggcacggcgtgaggaggcggcggtgaacgcgcagcagcagaagcgcagcatccaagaggagctgcagcacctgcggcagagctcagaggcagagatccaggccaaggcccagcaggtggaggctgcagagcgcagccggatgcgcattgaggaagagatccgagtggtgcgtctgcagctggagacaaccgagcgtcagcgtggaggggcagagggtgagctgcaggcgctgcgtgcacgggccgaggaggccgaagcccagaagcggcaggctcaggaggaagccgagcgcctgcgaagacaggtgcaggatgagagccagcgcaagaggcaggccgaggcagagctggccctgcgcgtgaaggcccaggccgaggcagctcaagagaagcagcgggccctgcaggccctggaggaactgcggctgcaggccgaggaggctgaacggcggctgcgccaggcccaggcggagagagcgcgccaagtgcaggtagctctggagacggcgcagcgcagtgcggaggtggagctgcagagcaagcgtgcgtcctttgcggagaagacagcgcagctggagcgcacgctgcaggaagagcacgtgacagtgacccagctgcgcgagaaggccgagcgtcgggcccagcagcaagcggaggctgagcgagcccgcgaggaggctgagcgggagctggagcgctggcagctaaaggccaacgaagcgcttaggctgcggctgcaagcagaagaggtggcccagcagaggagtctggcgcaggccgatgcagagaagcagaaggaggaggccgagcgtgaggcccggcggcgcggcaaggccgaggaacaggccgtgcggcagcgagagctggccgagcaggagctggagaagcagcggcagctggcggagggcaccgcgcagcagcgcctggctgcggagcaggagctcatccgcctgcgggccgagacggagcagggtgagcagcagcggcagctgctggaggaggagctggcccggctgcagcgggaagcgaccgcagccacgcacaagcgccaggagctggaggccgagctggccaaagtgcgggccgagatggaggtgctgctggccagcaaggcgcgagccgaggaagagtcccgttctaccagcgagaagtccaagcagaggctagaggccgaggccgaccgctttcgagagctggccgaggaggctgcgcgtctgcgcgccctggcggaggaggccaagcggcagcggcagctggctgaggaggacgcagcgcgccagcgggccgaggcagagcgagtgcttacggagaagctggccgccatcagtgaggccacgaggctcaagacggaggcagagattgccctcaaagagaaggaggccgagaatgagcgcctccggcgcctggctgaagacgaggccttccagcggcggcggctggaggagcaggcggccctgcacaaggccgacatagaggagcgcttggcccagctgcgcaaggcgtcggagagtgagctggagcgccagaagggcttggtggaggatacgctgcggcagcggcggcaggtggaggaggagatcctggcgctgaaggtgagctttgagaaagccgccgccggcaaggcggagctggagctggagctggggcgcatccgcagcagtgccgaggacacaatgcgcagcaaggagcaggcggagcaggaggcggcgcggcagcggcagctggcagccgaggaggagcagcggcgtcgggaggccgaggagcgcgtgcagaagagcctggccgctgaggaggaagccgcgcggcagcggaaggctgcactggaggaagtcgagcggctcaaggccaaggtggaggaagcgcggcgcctgcgagaacgagcagagcaggagtccgccaggcagctgcagctggcccaggaggctgcccagaagcgactgcaggcagaggagaaggcgcatgcctttgtggtgcagcagcgggaagaggagctgcagcagactctgcagcaggagcagagcatgctggagcggctgcggggtgaggcagaggcggcgcggcgagctgccgaggaggccgaggaggcccgggagcaggccgaacgggaggcggctcagtctcggaaacaagtggaagaggcggagcggctgaaacagtcggcggaggagcaggcccaggcccgggcccaggcccaggccgctgcagagaagctgcgtaaggaagctgagcaggaggcagcgcgtcgggcacaggcggagcaggcagcgttgaagcagaagcaagcagccgacgcggagatggagaagcacaagaagtttgcagagcagacgctgcggcagaaggcccaggtggagcaggagctgacgacgctgaggctgcagctggaggagactgaccaccagaagagcatcctggacgaggagctgcagcggctgaaggccgaggtgaccgaggctgcccggcagcgtagccaggtagaggaggagctcttctctgttcgcgtgcagatggaggagctgggcaagctcaaggcccgcattgaagccgaaaaccgggcactcatcctgcgtgacaaggacaacacccagcgcttcctggaggaggaggctgagaagatgaaacaggtggcggaggaggctgcgcggctgagtgtggctgcccaggaggcggcccggctgcggcagctggccgaggaagacctggcgcagcagcgggccctggcagagaagatgcttaaggagaagatgcaggcggtgcaggaagccaccaggctcaaggccgaggccgagctgctccagcagcagaaggagcttgctcaggagcaggcccggcggctgcaggaagacaaggagcagatggcccagcagttggtagaggagacgcagggtttccagcggacgctggaggtagagcggcagcggcagctggaaatgagcgcggaggccgagcgcctcaagctgcgcatggctgagatgagccgggcgcaggcccgtgcggaggaggatgcccagcgcttccggaagcaggctgaggagattggcgaaaagctgcaccgcactgaacttgctacgcaggagaaagtgacattggtgcagacgctggagatccagcgacaacagagcgatcacgatgccgagcgtctgagggaggccattgctgagctggagcgggagaaggagaagctcaagcaagaggccaaattgctgcagctgaagtctgaggagatgcagactgtgcagcaggagcagatcctgcaggagacgcaggcgctgcagaagagcttcctgtctgagaaggatagcctgctgcagcgggaacgcttcatcgagcaggagaaggccaagctggaacagcttttccaggacgaagtggcaaaagcgcagcagctccgggaggagcagcagcggcagcagcggcagatggagcaggagaaacaggagctggtggccagcatggaggaggccaggaggcggcagtgcgaggccgaggaggccgtgcggcgcaagcaggaggagctgcagcatctggagctgcagcggcagcagcaggagaagctgctggccgaggagaaccagaggctgcgagagcggctgcagcgcctggaggaggagcaccgggccgccctggctcactctgaggagattgcagctactcaggctgccgccgcgaaagccctgcccaatggccgcgacgcgctggatggcccgtccatggaggtggagcctgagcacgccttcgagggactgcgtcagaaggtgccggctctgcagctacgggaagcgggcattctgagcgcggaggaactgcagcggctggaacagggccacaccacagtggctgagctctcgcagagggaagatgtgcgccagtacctgcagggccgcagcagcattgcggggctgctgctaaagcccaccgatgagaaactgagtgtctacacagccctgcagaggcagctgcttagccccggaacagctcttatccttcttgaggcccaggcggcctcaggcttcctgctggaccctgtgcggaaccggcggctgactgtcaacgagcccgtgaaggagggcgtcgtgggtcctgagctgcaccacaagctcctgtcagccgagcgcgctgtcactggctacaaggacccctacacgggggagcagatctccctcttccaggccatgaagaaggacctcctcgtcagggaccacgccatccggctgctggaggcccagatcgccacggggggcatcatcgacaccgtgcacagccaccgcgtgcccgtggacgtggcctaccagcgcggctacttcgacgaggagatgagccgcatcctggctgaccctggggacgacaccaagggcttcttcgaccccaacacgcatgagaacctcacctacctgcagctgctggagcgctgcgtggaggaccccgagacgggcctgcacctcctgccgctcacagataaggccgccaagggtggtgagctggtgtacacggatacagaggcccgtgacgtctttgagaaggccactgtgtctgcaccgtttggcaagttccagggcaagaccgtgaccatctgggagatcatcaactcagagtacttcacagcggagcagcggcgggatctgctgcggcagttccgcacgggccgcatcacggtggagaagatcatcaagattgtcatcacggtggtggaggagcaggagcggaagggccagctctgcttcgagggcctccgagccctcgtgcctgctgcggagctcctggagagcggggtcattagccacgaactctaccagcagctgcaaaggggggagcgttctgtgcgggaggtggccgaggcagacagcgtgagacgggccctgcggggtgccagcgtcattgcaggagtgtggctggaagaggcagggcagaagctgagcatctatgaggccttgaagaaagacttgctgcagccagacgtggctgtggccttgctggaggcccaggctggcactgggcacatcattgaccctgccactagtgcccggctgaccgtggatgaggcggtgcgcgccggcctagtgggtcccgagctgcatgagaagctcttgtcagctgagaaggctgtgacaggctatagggacccctactcgggacaaagcgtgtcactgttccaggccctgaagaagggcctcatcccccgagagcagggcctgcgcctgctggacgcccagttatccaccggcggcatggtagaccccagcaagagccaccgtgtgccactggatgttgcgtatgcccggggctacctggacaaggagaccaacagggccctgacgtcacccaggaatgatgccagagtctaccttgaccccagcagccaggagccagccacctacagccagctgcagcagcggtgccgtgctgaccagctgaccgggctgagcctgctgccagtctcggagaaggccgtccgggcccggcaggaggaggtctactctgagctccaggcccgtgagacgctggagaaggcccgagttgaggtccccgtgggcggttttaagggcaggacaatgacagtgtgggagctcataagctctgagtacttcacccaggagcagcggcaggagctgctgcggcagttccgcacaggcaaggtcaccgtagagaaagtcatcaggatcgtcatcaccatcgtggaggaggtggagacccagcggcaggagcgactgtcctttagtggcctccgtgcccctgtgccggccagtgagctcttggctgccaagatcctcagcagagctcagtttgaccagctcaaggaaggcaagacatcagtcaaagacctgtcagaggtgggctctgtgcggacactcctgcaaggcagcggctgcctcgctggcgtctacctggaggactctaaggagaaagtgaccatctatgaggccatgcgccggggcctcctcagacccagcacagccacactcctgctggaggcccaggctgccactggctttctggtggaccctgtgcggaaccagcgtctgtatgtgcatgaggctgtcaaggcgggagtcgtgggtcctgagctccatgagaagctcctgtccgctgagaaggcggtcaccggctataaggacccctactcaggcaccaccatctcactcttccaggccatgaagaagggcttggtcctcagggagcacgccatccgcctgctggaggcccagatcgccacggggggcatcatcgaccccgtgcacagccaccgcctgcccgtggacgtggcctaccagcgcggctacttcgacgaggagatgagccgcatcctggctgacccgagcgacgacaccaagggcttcttcgaccccaacacgcacgagaacctcacctacctgcagctgctggagcgctgcgtggaggaccccgagacgggcctgcgccttctgccgctcaaaggggcagagaagacagaggtggtggaaaccacacaggtgtatacggaggaggagactaggagggcgtttgaggagacgcagattgacatcccgggtggtggcagccacggtggctcctccatgtccctgtgggaggtgatgcagtcagacatgatcccagaggatcagcgagcccggctcatggctgacttccaggctggccgagtgaccaaggagcgtatgatcatcattatcattgagatcatcgagaagaccgagatcatccgccagcagaaccttgcctcctatgactacgtgcgccgccgcctcactgccgaggacctgtacgaggcccggatcatctccctcgagacctacaacctcttccgggaaggcaccaagagcctccgtgaagttctggagatggagtctgcctggcgctacctttatggcacagggtcagtggccggggtctacctgcctggctctcggcagacgctgaccatctaccaggcccttaagaaggggctgctgagtgctgaggtggcccgcttgttgctggaagcacaggcagccacaggcttcctgctggatccagtaaagggtgagcggctgaccgtggatgaggccgtgcggaagggtctggtaggccccgagctgcatgatcggctgctgtccgcagagcgggctgtgactggctaccgtgacccctataccgaacagaccatctcactcttccaggccatgaagaaggagctgatccctgctgaggaggcgctgaggctgctggacgcccagctagccacaggaggcattgtggacccccgcctggggttccacctccctctggaggtggcttaccaacgcggctacctcaataaggacacacatgaccagctgtcagagcccagtgaggtgcgcagctacgtggacccctccacggatgagcgcctcagctacacacagctgctcaagcggtgccgccgtgatgacggcagtggccagatgctcctgccgctctctgatgcccgcaggctgaccttccgaggcctgcgcaagcagatcactgtggaggagctggtgcgttctcaggtcatggacgaggccacggcgctacagctgcaagaaggcctgacctccatcgaggaggtcaccaagaccctgcagaagttccttgagggtaccagctgcatcgccggagtcttcgttgacgccaccaaggagcggctgtcagtgtaccaggccatgaagaagggcattatccgccccggcacggcctttgagctcctggaagcacaggcggccactggctatgtcattgaccctatcaagggactcaagctgactgtggaggaggctgtgcgcatgggtatcgtgggccccgagttcaaagacaggctgctgtcagccgagcgcgccgtcactggctacaaggatccctactctgggaaactcatctctctcttccaggccatgaagaagggcctaatcctgaaggaccacggcatccgtctgctggaggctcagatcgccactggcggcatcatcgaccccgaagagagccaccgcctacctgtggaagtggcctataagcgtggcctcttcgacgaggagatgaatgagatcctgaccgatccctcagatgacaccaagggcttctttgaccccaacacagaggagaacctcacctacctgcagctgatggagcgctgcatcactgacccccagactggcctgcgtctcctgccactgaaggagaagaagcgggagcggaagacgtcctccaagtcttcagtgcgtaagcgccgtgtggtgattgtggaccctgagacaagcaaggagatgtcggtgtacgaggcctaccgcaagggcctcattgaccaccagacgtacctggagctgtcagagcaggagtgcgagtgggaagaaatcaccatctcctcgtcagacggcgtggtcaaatctatgatcattgaccggcgctctggccgacagtatgacattgatgacgccatcaccgagaacctcattgaccgctccgcactggaccagtaccgtgcgggcacactttccatcactgagtttgctgacatgctctcgggcaatgctggcggcttccgctcccgctcctcctccgtgggttcatcatcttcctaccccatcagccctgccgtctcgaggacccagttggcttcctggtctgatcctaccgaggagaccggcccagtggctggcatcctggacacagagactctggagaaggtgtccatcacggaggccatgcaccgcaacctggtagacaacatcactggccagcggctgctggaggcacaggcctgcactgggggcatcatcgatcccagcacgggtgagcgcttcccagtcactgaggctgtcaacaagggcctggtagacaagatcatggtagaccgcatcaatctggcccagaaggccttctgtgggttcgaggacccacgcaccaagaccaagatgtcagccgcgcaggccctgaagaagggctggctgtactacgaggcaggccagcgcttcctggaggtgcagtacctaacgggtggtctgattgagcccgacacccctggccgtgtacccctcgatgaggccctgcaacgtggcaccgtggatgctcgcacggcccagaagctgcgtgacgtcagtgcctactccaagtacctcacgtgccccaagaccaagctcaagatctcctacaaggatgctttggaccgcagcatggtggaggagggcacggggctgaggctgttggaagccgcagcacagtccagcaagggctactacagtccctacagtgtcagcggctctggctccaccaccggttcacgcactggttcacgcaccggctcccgggccggctcccgccgtggcagctttgatgccactggctctggcttctccatgaccttctcgtcttcctcttactcttcctccgggtatggccgccgctacgcctcagggcctccagcctctttagggggtcctgagtccgcggtggcc

SEQ ID NO: 84 - protein, 4450 aa, Cricetulus griseus
MRFHKLQNVQIALDYLRHRQVKLVNIRNDDIADGNPKLTLGLIWTIILHFQISDIQVSGQSEDMTAKEKLLLWSQRMVEGYQGLRCDNFTTSWRDGRLFNAIIHRHKPMLIDMNKVYRQTNLENLDQAFSVAERDLGVTRLLDPEDVDVPQPDEKSIITYVSSLYDAMPRVPGAQNGVRANELQLRWQEYRELVLLLLQWIRHHTAAFEERKFPSSFEEIEILWCQFLKFKETELPAKEADKSRSKGIYQSLEGAVQAGQLQIPPGFHPLDVEKEWGKLHVAILEREKQLRGEFERLECLQRIVSKLQMEAGLCEEQLNQADSLLQSDIRLLASGKVAQRAGEVERDLDKADGMIRLLFNDVQTLKDGRHPQGEQMYRRVYRLHERLVAIRTEYNLRLKAGVAAPVTQVTVQSTQRRPELEDSTLRYLQDLLAWVEENQRRIDSAEWGVDLPSVEAQLGSHRGMHQSIEEFRAKIERARNDESQLSPATRGAYRECLGRLDLQYAKLLNSSKARLRSLESLHGFVAAATKELMWLNEKEEEEVGFDWSDRNTNMAAKKESYSALMRELEMKEKKIKETQNTGDRLLREDHHARPTVESFQAALQTQWSWMLQLCCCIEAHLKENTAYFQFFSDVREAEEQLQKLQETMRREYSCDRSITVTRLEDLLQDAQDEREQLNEYKGHLSGLAKRAKAIVQLKPRNPAHPVRGHVPLMAVCDYKQVEVTVHKGDQCQLVGPAQPSHWKVLRGPSSEAAVPSVCFLVPPPNQEAQEAVARLEAQHQALVTLWHQLHVDMKSLLAWQNLSRDIQLIRSWSLVTFRTLKPEEQRQALRNLELHYQAFLRDSQDAGGFGPEDRLVAEREYGSCSRHYQQLLQSLEQGEQEESRCQRCISELKDIRLQLEACETRTVHRLRLPLDKEPARECAQRIAEQQKAQAEVEGLGKGVARLSAEAEKVLALPEPSPAAPTLRSELELTLGKLEQVRSLSAIYLEKLKTISLVIRSTQGAEEVLKAHEEQLKEAQAVPATLQELEATKASLKKLRAQAEAQQPVFDTLRDELRGAQEVGERLQQRHGERDVEVERWRERVNQLLERWQAVLAQIDVRQRELEQLGRQLRYYRESADPLSSWLQDAKRRQEQIQAVPIPNSQAAREQLRQEKALLEEIERHGEKVEECQKFAKQYINAIKDYELQLVTYKAQLEPVASPAKKPKVQSGSESVIQEYVDLRTRYSELTTLTSQYIKFISETLRRMEEEERLAEQQRAEERERLAEGEAALEKQRQLAEAHAQAKAQAELEAQELQRRMQEEVARREEAAVNAQQQKRSIQEELQHLRQSSEAEIQAKAQQVEAAERSRMRIEEEIRVVRLQLETTERQRGGAEGELQALRARAEEAEAQKRQAQEEAERLRRQVQDESQRKRQAEAELALRVKAQAEAAQEKQRALQALEELRLQAEEAERRLRQAQAERARQVQVALETAQRSAEVELQSKRASFAEKTAQLERTLQEEHVTVTQLREKAERRAQQQAEAERAREEAERELERWQLKANEALRLRLQAEEVAQQRSLAQADAEKQKEEAEREARRRGKAEEQAVRQRELAEQELEKQRQLAEGTAQQRLAAEQELIRLRAETEQGEQQRQLLEEELARLQREATAATHKRQELEAELAKVRAEMEVLLASKARAEEESRSTSEKSKQRLEAEADRFRELAEEAARLRALAEEAKRQRQLAEEDAARQRAEAERVLTEKLAAISEATRLKTEAEIALKEKEAENERLRRLAEDEAFQRRRLEEQAALHKADIEERLAQLRKASESELERQKGLVEDTLRQRRQVEEEILALKVSFEKAAAGKAELELELGRIRSSAEDTMRSKEQAEQEAARQRQLAAEEEQRRREAEERVQKSLAAEEEAARQRKAALEEVERLKAKVEEARRLRERAEQESARQLQLAQEAAQKRLQAEEKAHAFVVQQREEELQQTLQQEQSMLERLRGEAEAARRAAEEAEEAREQAEREAAQSRKQVEEAERLKQSAEEQAQARAQAQAAAEKLRKEAEQEAARRAQAEQAALKQKQAADAEMEKHKKFAEQTLRQKAQVEQELTTLRLQLEETDHQKSILDEELQRLKAEVTEAARQRSQVEEELFSVRVQMEELGKLKARIEAENRALILRDKDNTQRFLEEEAEKMKQVAEEAARLSVAAQEAARLRQLAEEDLAQQRALAEKMLKEKMQAVQEATRLKAEAELLQQQKELAQEQARRLQEDKEQMAQQLVEETQGFQRTLEVERQRQLEMSAEAERLKLRMAEMSRAQARAEEDAQRFRKQAEEIGEKLHRTELATQEKVTLVQTLEIQRQQSDHDAERLREAIAELEREKEKLKQEAKLLQLKSEEMQTVQQEQILQETQALQKSFLSEKDSLLQRERFIEQEKAKLEQLFQDEVAKAQQLREEQQRQQRQMEQEKQELVASMEEARRRQCEAEEAVRRKQEELQHLELQRQQQEKLLAEENQRLRERLQRLEEEHRAALAHSEEIAATQAAAAKALPNGRDALDGPSMEVEPEHAFEGLRQKVPALQLREAGILSAEELQRLEQGHTTVAELSQREDVRQYLQGRSSIAGLLLKPTDEKLSVYTALQRQLLSPGTALILLEAQAASGFLLDPVRNRRLTVNEPVKEGVVGPELHHKLLSAERAVTGYKDPYTGEQISLFQAMKKDLLVRDHAIRLLEAQIATGGIIDTVHSHRVPVDVAYQRGYFDEEMSRILADPGDDTKGFFDPNTHENLTYLQLLERCVEDPETGLHLLPLTDKAAKGGELVYTDTEARDVFEKATVSAPFGKFQGKTVTIWEIINSEYFTAEQRRDLLRQFRTGRITVEKIIKIVITVVEEQERKGQLCFEGLRALVPAAELLESGVISHELYQQLQRGERSVREVAEADSVRRALRGASVIAGVWLEEAGQKLSIYEALKKDLLQPDVAVALLEAQAGTGHIIDPATSARLTVDEAVRAGLVGPELHEKLLSAEKAVTGYRDPYSGQSVSLFQALKKGLIPREQGLRLLDAQLSTGGMVDPSKSHRVPLDVAYARGYLDKETNRALTSPRNDARVYLDPSSQEPATYSQLQQRCRADQLTGLSLLPVSEKAVRARQEEVYSELQARETLEKARVEVPVGGFKGRTMTVWELISSEYFTQEQRQELLRQFRTGKVTVEKVIRIVITIVEEVETQRQERLSFSGLRAPVPASELLAAKILSRAQFDQLKEGKTSVKDLSEVGSVRTLLQGSGCLAGVYLEDSKEKVTIYEAMRRGLLRPSTATLLLEAQAATGFLVDPVRNQRLYVHEAVKAGVVGPELHEKLLSAEKAVTGYKDPYSGTTISLFQAMKKGLVLREHAIRLLEAQIATGGIIDPVHSHRLPVDVAYQRGYFDEEMSRILADPSDDTKGFFDPNTHENLTYLQLLERCVEDPETGLRLLPLKGAEKTEVVETTQVYTEEETRRAFEETQIDIPGGGSHGGSSMSLWEVMQSDMIPEDQRARLMADFQAGRVTKERMIIIIIEIIEKTEIIRQQNLASYDYVRRRLTAEDLYEARIISLETYNLFREGTKSLREVLEMESAWRYLYGTGSVAGVYLPGSRQTLTIYQALKKGLLSAEVARLLLEAQAATGFLLDPVKGERLTVDEAVRKGLVGPELHDRLLSAERAVTGYRDPYTEQTISLFQAMKKELIPAEEALRLLDAQLATGGIVDPRLGFHLPLEVAYQRGYLNKDTHDQLSEPSEVRSYVDPSTDERLSYTQLLKRCRRDDGSGQMLLPLSDARRLTFRGLRKQITVEELVRSQVMDEATALQLQEGLTSIEEVTKTLQKFLEGTSCIAGVFVDATKERLSVYQAMKKGIIRPGTAFELLEAQAATGYVIDPIKGLKLTVEEAVRMGIVGPEFKDRLLSAERAVTGYKDPYSGKLISLFQAMKKGLILKDHGIRLLEAQIATGGIIDPEESHRLPVEVAYKRGLFDEEMNEILTDPSDDTKGFFDPNTEENLTYLQLMERCITDPQTGLRLLPLKEKKRERKTSSKSSVRKRRVVIVDPETSKEMSVYEAYRKGLIDHQTYLELSEQECEWEEITISSSDGVVKSMIIDRRSGRQYDIDDAITENLIDRSALDQYRAGTLSITEFADMLSGNAGGFRSRSSSVGSSSSYPISPAVSRTQLASWSDPTEETGPVAGILDTETLEKVSITEAMHRNLVDNITGQRLLEAQACTGGIIDPSTGERFPVTEAVNKGLVDKIMVDRINLAQKAFCGFEDPRTKTKMSAAQALKKGWLYYEAGQRFLEVQYLTGGLIEPDTPGRVPLDEALQRGTVDARTAQKLRDVSAYSKYLTCPKTKLKISYKDALDRSMVEEGTGLRLLEAAAQSSKGYYSPYSVSGSGSTTGSRTGSRTGSRAGSRRGSFDATGSGFSMTFSSSSYSSSGYGRRYASGPPASLGGPESAVA

SEQ ID NO: 85 - DNA, 5268 bp, Homo sapiens
  CDS (1)..(5268)
atgaactcgctcttcaggaagagaaacaaaggcaaatacagccccactgtgcagacccggagcatctctaacaaggagctctcggagctgatcgagcagctgcagaagaatgccgaccaggtggagaagaacatcgtggacacagaggccaagatgcagagtgacctggctcggctgcaggagggtcggcagcctgagcaccgggacgtgaccctgcagaaggtgttggactctgagaagctgctctatgtgctagaggcggatgcggccattgccaagcacatgaagcacccacagggggacatgatcgccgaggatatccgccagctgaaggagcgtgtgaccaacctgcgcgggaaacacaagcagatctacaggctggcggtgaaggaagtggatccacaggtcaactgggcggcactggtggaggagaagctggacaagctgaacaaccagagctttgggactgacctgccgctggtggaccaccaagtggaggagcataacatcttccacaatgaggtcaaggccatcgggccccacctggccaaggacggggacaaggagcagaacagcgaactccgggccaagtaccagaaactgctggcagcatcacaggcccggcagcagcacctgagttcgctgcaggactacatgcagcgctgcaccaatgagctgtactggctggaccagcaggccaagggccgcatgcagtacgactggagtgaccgcaacctcgactaccccagccgccggcgccagtatgagaatttcatcaaccggaacctggaggccaaagaggagagaatcaacaaactgcacagcgagggcgaccagctgctggcggccgagcaccccgggaggaactccattgaggcgcacatggaggctgtgcacgcagactggaaggagtacctgaacctgctcatctgcgaggagagccacctcaagtacatggaggactaccaccagtttcacgaagacgtgaaggacgctcaggagctgctgcgcaaggtggactcggacctgaaccagaagtatggccctgacttcaaggaccggtaccagattgagctgctgctgcgggagctggatgaccaggagaaggtgctggacaagtatgaggacgtggtgcaggggctgcagaagcgaggccagcaggtggtgcccctcaagtaccgccgggagactccgctcaagcccatccccgtggaggcactctgtgactttgagggggagcagggcctgatctcgcggggctacagctacaccctgcagaagaacaacggggagagctgggagctcatggacagcgctgggaacaagctgattgctccggccgtctgttttgtgatcccccccacagaccctgaggccctggctctggctgacagcctgggcagccagtaccggagcgtgcggcagaaggcagctgggagcaaacgcacgctgcagcagcggtatgaggtgctgaagaccgagaatcccggagatgcctctgacctacaggggcggcagctgctggctggcttggacaaggtggccagcgacctggaccggcaggagaaggccatcacagggatcctgcggccaccactggagcaaggccgggctgtgcaggacagtgccgagcgggccaaggacctcaagaacatcaccaacgagctactgcggattgaacctgagaagacgcggagcacggctgagggcgaagccttcatccaggccctcccaggcagtggcaccacacccctgctgaggacccgggtggaggacaccaaccggaaatacgagcacctcctgcagctgctggacttggcccaggagaaggttgatgtggccaaccgcctggagaagagcctgcagcagagctgggagttgctggccacacacgagaaccatctgaatcaggatgacacagtgcctgagagcagccgtgtcctggacagcaaggggcaggagctggcggccatggcctgtgagttacaggcccagaagtccctcctgggtgaggtggagcagaacttgcaggcggccaagcagtgctcgagcacactggccagccgcttccaggagcactgcccggacctggagcgccaggaggccgaggtgcacaagctgggccagcgtttcaacaacctgcgccagcaggtggaacgcagggcgcagagcctacagagcgccaaggcagcctacgagcacttccaccgcggccatgaccacgtgctgcagttcctagtcagcatccccagttacgagccccaggagacagacagcctcagccagatggagaccaagctgaagaaccagaagaacctgctagatgagatagcaagtagggagcaggaagtacagaagatctgtgccaattcccagcagtaccagcaagctgtaaaggactatgagttagaagcagaaaaactaaggtctcttctcgacttggagaatggaaggagcagccacgtgagcaagagagccaggctccaatctcctgccaccaaagtgaaggaagaggaagcagcacttgccgccaagttcactgaagtttatgccatcaacagacagaggctgcagaatctggagtttgctctgaatctcctcagacagcagccggaagtagaagtgacccatgagaccctgcaaaggaataggccggactctggagtggaggaggcgtggaagatcaggaaggaactggatgaggagactgagcggaggcggcagctggagaacgaggtcaagagcacccaggaagaaatctggaccttgaggaatcaggggcctcaggaatcggtggtgaggaaggaggtgctcaagaaggtgccggatcccgtgctggaggagagcttccagcagctgcagcggacgctggcagaggagcagcacaagaaccagctgctgcaggaggagctggaggcactgcagctgcagctgcgtgccctggagcaggagaccagagacggggggcaggagtacgtggtcaaggaggtcctgcgcatcgagcctgacagggcccaggcggatgaggtcttgcagctgcgggaggagctggaggcactgaggcggcagaagggcgcccgggaggcagaggtgctcctcctgcagcagcgtgtggccgccctggctgaagagaagagccgggcgcaggagaaggtcacagagaaagaggtggtgaaactgcagaatgacccccagctggaggcagagtaccagcagctgcaggaggaccaccagcgccaggaccagctcagggagaagcaggaggaggagctgagcttcctccaggacaagctcaagaggctagagaaggagcgggccatggccgagggcaagatcaccgtcaaggaggtgctcaaggtggagaaggacgcggccaccgagagggaggtcagcgatctcacccgccaatatgaggacgaggctgccaaggctcgcgctagccagagggagaagacggagctgctccgaaagatatgggccttggaggaggagaacgccaaagtggtggtgcaggagaaggtgcgggagatcgtgcggccagaccccaaggcggaaagtgaagtggcgaacctccgcctggagcttgtggagcaggagcgaaagtaccggggtgccgaggagcagctccggagctaccagagtgagctggaggccctcaggaggcgaggcccccaggtggaagtcaaagaggtgactaaggaagtcattaagtacaagactgaccctgagatggagaaggagcttcagcggctcagggaggagatcgtggacaagaccagactgatcgaaaggtgtgatttagagatctaccagctgaaaaaggaaatccaggccctgaaagacaccaaaccccaggtccagaccaaagaggtggtccaggagatcctccaattccaagaagaccctcaaaccaaggaggaggtggcgtctctgagggcaaagctctcagaggagcagaagaaacaagtggatctggagagggaaagagcttcccaggaagagcagatcgcccggaaagaggaggagctctcgcgggtgaaggaaagggtggtgcagcaggaggtggtcaggtatgaggaggagccaggcctgcgggccgaggcgagcgcctttgccgagagcatcgatgtggagctgcggcagattgacaagctgcgggcagagctgcggcggctgcagcgccggcgcaccgagcttgagcggcagctggaggagctagagcgcgagcggcaggcccgcagggaggccgagcgcgaggtacagcggttgcagcagcggctggcagcgctggagcaggaagaagctgaggcccgtgagaaggtaacccatacgcagaaggtggtgctgcagcaggacccgcagcaggcgcgagagcatgccctgctccgactccagctggaagaagagcagcaccggcggcagctcctggagggggagctcgagaccctccggaggaaactggctgcactggagaaggcggaggtcaaggagaaggtggtgctctccgagagtgtccaggtggagaagggcgacaccgagcaagagatccagaggctcaagagcagcctggaggaggagagccgcagcaagcgcgagctggacgtcgaggtgagccggctggaagccaggctttcggagctggaattccataactccaagtcatccaaggaactagactttctgagggaagagaaccacaaattacagctggagaggcaaaacctgcagctggagacccgaaggctccaatcggaaatcaacatggcagcgacggaaacacgagacctgcggaacatgaccgtggcggactctgggaccaaccatgactccagactgtggtccctggagagggaactggatgacctcaagaggctctccaaggacaaagacctcgagatcgacgagctgcagaagcgcctgggctccgtggccgtcaagcgggagcagcgggagaaccacctgcggcgctccatcgtagtcatccaccctgacacaggccgcgagctgtccccggaggaagcccaccgtgccgggctcattgactggaacatgttcgtgaaactcagaagccaggagtgcgactgggaggagatctcagtgaagggtcccaatggggagtcctcagtgatacacgacaggaagtctggcaagaagttctccatcgaagaggccctgcagagtggcaggctgacccctgctcagtatgaccgctatgtcaacaaggatatgtccatccaggagctggcggtcttggtatctgggcagaag

SEQ ID NO: 86 - protein, 1756 aa, Homo sapiens
MNSLFRKRNKGKYSPTVQTRSISNKELSELIEQLQKNADQVEKNIVDTEAKMQSDLARLQEGRQPEHRDVTLQKVLDSEKLLYVLEADAAIAKHMKHPQGDMIAEDIRQLKERVTNLRGKHKQIYRLAVKEVDPQVNWAALVEEKLDKLNNQSFGTDLPLVDHQVEEHNIFHNEVKAIGPHLAKDGDKEQNSELRAKYQKLLAASQARQQHLSSLQDYMQRCTNELYWLDQQAKGRMQYDWSDRNLDYPSRRRQYENFINRNLEAKEERINKLHSEGDQLLAAEHPGRNSIEAHMEAVHADWKEYLNLLICEESHLKYMEDYHQFHEDVKDAQELLRKVDSDLNQKYGPDFKDRYQIELLLRELDDQEKVLDKYEDVVQGLQKRGQQVVPLKYRRETPLKPIPVEALCDFEGEQGLISRGYSYTLQKNNGESWELMDSAGNKLIAPAVCFVIPPTDPEALALADSLGSQYRSVRQKAAGSKRTLQQRYEVLKTENPGDASDLQGRQLLAGLDKVASDLDRQEKAITGILRPPLEQGRAVQDSAERAKDLKNITNELLRIEPEKTRSTAEGEAFIQALPGSGTTPLLRTRVEDTNRKYEHLLQLLDLAQEKVDVANRLEKSLQQSWELLATHENHLNQDDTVPESSRVLDSKGQELAAMACELQAQKSLLGEVEQNLQAAKQCSSTLASRFQEHCPDLERQEAEVHKLGQRFNNLRQQVERRAQSLQSAKAAYEHFHRGHDHVLQFLVSIPSYEPQETDSLSQMETKLKNQKNLLDEIASREQEVQKICANSQQYQQAVKDYELEAEKLRSLLDLENGRSSHVSKRARLQSPATKVKEEEAALAAKFTEVYAINRQRLQNLEFALNLLRQQPEVEVTHETLQRNRPDSGVEEAWKIRKELDEETERRRQLENEVKSTQEEIWTLRNQGPQESVVRKEVLKKVPDPVLEESFQQLQRTLAEEQHKNQLLQEELEALQLQLRALEQETRDGGQEYVVKEVLRIEPDRAQADEVLQLREELEALRRQKGAREAEVLLLQQRVAALAEEKSRAQEKVTEKEVVKLQNDPQLEAEYQQLQEDHQRQDQLREKQEEELSFLQDKLKRLEKERAMAEGKITVKEVLKVEKDAATEREVSDLTRQYEDEAAKARASQREKTELLRKIWALEEENAKVVVQEKVREIVRPDPKAESEVANLRLELVEQERKYRGAEEQLRSYQSELEALRRRGPQVEVKEVTKEVIKYKTDPEMEKELQRLREEIVDKTRLIERCDLEIYQLKKEIQALKDTKPQVQTKEVVQEILQFQEDPQTKEEVASLRAKLSEEQKKQVDLERERASQEEQIARKEEELSRVKERVVQQEVVRYEEEPGLRAEASAFAESIDVELRQIDKLRAELRRLQRRRTELERQLEELERERQARREAEREVQRLQQRLAALEQEEAEAREKVTHTQKVVLQQDPQQAREHALLRLQLEEEQHRRQLLEGELETLRRKLAALEKAEVKEKVVLSESVQVEKGDTEQEIQRLKSSLEEESRSKRELDVEVSRLEARLSELEFHNSKSSKELDFLREENHKLQLERQNLQLETRRLQSEINMAATETRDLRNMTVADSGTNHDSRLWSLERELDDLKRLSKDKDLEIDELQKRLGSVAVKREQRENHLRRSIVVIHPDTGRELSPEEAHRAGLIDWNMFVKLRSQECDWEEISVKGPNGESSVIHDRKSGKKFSIEEALQSGRLTPAQYDRYVNKDMSIQELAVLVSGQK

SEQ ID NO: 87 - DNA, 5265 bp, Mus musculus
  CDS (1)..(5265)
atgcactcgctcttcaggaagagaaacaaaggcaaatacagcccaacggtgcagacgcggagcatctccaacaaggaactctcagatctgattgagcagctgcagaagaatgcagaccaggtggaaaggaacattgtggacaccgaggccaagatgcagagcgacttggcccggatgcaagaggggcagctccctgagcaccgggacgcggccctgcagaacgtgtctgactcagaaaagctgctgtacgtgctggaggcagattcggccatcgccaagcacatgaagcacccacagggggacatgatcgccgaggacatccgccagctgaaagagcgcgtgaccaacctgcgggggaaacacaagcagatgtacagcctggcagtgaaagaggccgacccgagagtcaactgggacacactggtggacgagaagctggacaagctgagcagccagagctttgggactgaccttcctctggtggatagccaggtggagcaacacaacatcttccacaatgaagtcaaagccatcgggccccacctggccaaggacaaggagcagaacagtgaactccaagccaagtatcagaagttgctgacagcatcacaggcacggcagcagcacctgagctcgctgcaggattacatgcagcgctgcaccaatgagctgtactggctggaccagcaagccaagggccgcatgcagtatgactggagcgaccgcaacctcgactaccccagccgccgccgccagtacgagaatttcatcaaccggaacctggaggccaaagaagaaagaatcaacaaactgcacactgaaggtgaccaactgctgacagctgagcacccagggaggaactccattgaggcacacatggaggctgtgcatgctgagtggaaggagtacctgaacctgctcatctgtgaggagagccatctgaaatacatggaagactaccaccaatttcacaaagacatgaaggatgctcaggagctgctacgcaaggtggactcagacttgaaccagaaatatagccctgacttcaaagaccggtatcagatagagctgttgcttcgggaactggatgaccaggagaaggctctggacaagtatgaggatgtggtgcgagggctgcagaggcgagggcagcaagtggtgccactcaagtaccgccgcgagacgccgctcaagcccatccctgtggaggctctctgtgactttgagagtgaccagggcctcatctcgcggggctatagctacacactgcagaagaacaacggggagagctgggagctgacagacagcactgggaagaagctggctgccccagccgtctgcttcatcattccccccaccgaccccgaggccttggctcttgctgacagcctgggcagccagtaccgaagtgtgaggcagaaggcgactgggagcaaacatgcactccagcagcggcatgaggtgctaaggacggagaaccctggagatgcctctgatcttcagggacgacagctgctggctggcttggacaaagtggccagtgacctggaccggcaggaaaaggctatcacagggatcctacggccaccacttgagcagggacgggcaattgaggatagtgcggagcgggccaagggtctcaagaacattaccaatgagctgctacagattgagccagagaagacgcagtgcacagccgagtgtgaagcctttgtgcaggccctcccggccagcggcaccgcacccttgctgaagacccgggtagaagacaccaaccagaaatatgagcgactagtatggttgctagaggcagcccaggagaaggtggacgtggccaaccgcctggagaacagtctgcagcggggcagggagctgctggcctcatacgagaacaggctgattcaggacgacacaatgcctgaaagtggtcatgtgttggacaggaagaggcaggagctggaggccatggcttctgagctgcaggcccacaagtccctcctgggtgaggtgggaaagaacctacaggtggccaagcagtgttccagctcactggccagccgcttccaagagcactgccctgacctggagcggcaggaggccgaggtgcacaagctcaaccaacgtttcaacaacctcagccagcaggtggaacggagggcccagagcctgcagagtgccagggctgcctacgatgaatactgcagtggttacaaccgtgtgctccagtttttggccaagactcccagttatgagccccaggagacagacagcctcggccagatggagaccaagctcaagaaccagaagaacttgcttgatgagctagcaagcagggaacaggaggtgcagaaggtctatgcagattcccagcagtaccagcaagcggtgaaggactatgaacttgaagcagagaagctaaggtccttgctggacctggagaatggacggaacagccatgtgaacaagagagccaggctgcagtctcctgctgccaaagtgaaggaagaggaagctgctcttgctgccaagttcacagaggttaatgccatcaacagacagaggctacagaatttggagtttgcactgaatctcttgagacagcaaccagaagcaggagtgacccatgagaccctacaagggggaaagctaagctctggcatggaggaaacatggaagattaagaaggaactggaggaggagatagagcgaaggcaacagctggaaaatgaggtcaagagtgcccaggaggaaatccagaccctgaaggatcaggggcctcaggagtcattggtgaggaaggaggtgctgaagaaggtgccagaccctgccctggaggagagcttccagcagctgcagcagacgctggctgaggaacagcacaagaaccagctattgcaggaggagctgggagcactgcagctccggctgcaggctctagagcaggagaccagggatgggggacaggagtatgtggtcaaggaggtcttgcgcattgagccagacagagcccaggaggatgaggtcttgcagcttcgggaggagctggaggcactgcggcgccagaaaggcgcccgagaggctgaagtgctactcttacagcagcgtgtagcagccctggctgctgagaagagcagggtgcaggaaaaggtcactgagagagaggtggtaaagctacagaatgacccccaactggaggcagaataccggaggctgcaggaggagcaccagcgggagggcacactcagggagaagcaggaggaggagctgagtttcctacaggctaagctcaggagactggagaaagaacgagccatggcagaaggcaagatcactgtcaaagaggtgctcaaggtagagaaagatgcagctgtggagagagaagtcaatgacctcacccgccagtatgaggacgaggctgccaaggcacgctctggccagcgggagaagacagaacttctcagaaagatatgggccctggaagaggaaaatgctaaggtggtggtacaggagaaggtccgagagatcgtgcggccagatcccaaggcagagagtgaagtggccaacctccgcctggagctggtggagcaggagcgcaaattcaggggtgctgaggagcagctgaagagctaccagagtgagctggaggccctacggaaccgtggaccacaggtagaagtcaaagaggtgaccaaagaggtcattaaatatacaactgacccagagacagagcaggaactccagaggctcagggaggagatcatggacaagaccaggttaatagaaaggtgtgacctagagatttaccagctgaagcaggagatccaggcccttaaggacaccaagccacaggtgcagactagagaggtagtccaggagatcctgcagttccaggaagacccccaaaccaagaaggaggtagagtctctgcgtatacagctgtcagaagaacagaagaaacaggtggacctggaaggggagcgggcatcccaggaagagaagatcaaacgcaaggaggaagagctggcacagcagaggaaggaaagggttgtacgccaggaggtagtacagtatgaagatgagccagatttgcgagctgaggtgactgccttcacaaacagcattgatgctgagctgcggcagattgataaactgcatgtggagctacggcggttacagcatcgccgagcagagctggagaggcagttggaggagctggagcgggagaggcaggcacgtagggcagccgagctggaggtacagaggctgcaacagcggctggctgcattggagcaggaggaggccaagactggtgagaaggtgacccacacacaaaaggtggtgctgcagcaggacccacagcagaccagggagcatgccctgctccgagcccagctggaggaagagcggcaccggaggcagctactggagggtgagcttgagccgctgcgtagaaagttggctgccctggagaaggcagagatcaaagaaaaggtggtcttctctgagagtgtccaggtagaaaaaggtgacactgagcaagagatccagcgcctcaagaagagcctggaagaggagagccagagcaagagggagctggattcagaggtgacccggctagaagccaagttatctgagctagaattctataattccaagtcatccaaggaactggacttcctgagagaagaaaaccacaagctacagctagagcggcaaaacctgcagctagagacccggagactccaatcagagattgagatggcagcaacagaaactcgagatctgaagaacataaccacgatagactctgggacccacctaaactctaggctgtggtccctagagaaggaactggatgacctcaagaagatgtccaaggacaaggatctggagatcgatgaactacagaggcgcctgggctctgtggctgtcaagagagagcagagggagaaccacctgaggcgctccatagtggtcatagaccctgacacaggtcgtgagctgtccccagaggaggctcaccgggctgggcttatcgactggaaaatgtttgtgaagctcagaagccaggagtgcgactgggaggagatatcagtgaaaggtcctaatggggagtcatcagtaattcatgacaggaagtcaggcaagaagttctccattgaggacgctcttcagagtggcaggctaaccgctgctcaatatgaccgctatgtcaacaaggatatgtccattcaggagctggcagtcttggtgtctgggcagaag

SEQ ID NO: 88 - protein, 1755 aa, Mus musculus
MHSLFRKRNKGKYSPTVQTRSISNKELSDLIEQLQKNADQVERNIVDTEAKMQSDLARMQEGQLPEHRDAALQNVSDSEKLLYVLEADSAIAKHMKHPQGDMIAEDIRQLKERVTNLRGKHKQMYSLAVKEADPRVNWDTLVDEKLDKLSSQSFGTDLPLVDSQVEQHNIFHNEVKAIGPHLAKDKEQNSELQAKYQKLLTASQARQQHLSSLQDYMQRCTNELYWLDQQAKGRMQYDWSDRNLDYPSRRRQYENFINRNLEAKEERINKLHTEGDQLLTAEHPGRNSIEAHMEAVHAEWKEYLNLLICEESHLKYMEDYHQFHKDMKDAQELLRKVDSDLNQKYSPDFKDRYQIELLLRELDDQEKALDKYEDVVRGLQRRGQQVVPLKYRRETPLKPIPVEALCDFESDQGLISRGYSYTLQKNNGESWELTDSTGKKLAAPAVCFIIPPTDPEALALADSLGSQYRSVRQKATGSKHALQQRHEVLRTENPGDASDLQGRQLLAGLDKVASDLDRQEKAITGILRPPLEQGRAIEDSAERAKGLKNITNELLQIEPEKTQCTAECEAFVQALPASGTAPLLKTRVEDTNQKYERLVWLLEAAQEKVDVANRLENSLQRGRELLASYENRLIQDDTMPESGHVLDRKRQELEAMASELQAHKSLLGEVGKNLQVAKQCSSSLASRFQEHCPDLERQEAEVHKLNQRFNNLSQQVERRAQSLQSARAAYDEYCSGYNRVLQFLAKTPSYEPQETDSLGQMETKLKNQKNLLDELASREQEVQKVYADSQQYQQAVKDYELEAEKLRSLLDLENGRNSHVNKRARLQSPAAKVKEEEAALAAKFTEVNAINRQRLQNLEFALNLLRQQPEAGVTHETLQGGKLSSGMEETWKIKKELEEEIERRQQLENEVKSAQEEIQTLKDQGPQESLVRKEVLKKVPDPALEESFQQLQQTLAEEQHKNQLLQEELGALQLRLQALEQETRDGGQEYVVKEVLRIEPDRAQEDEVLQLREELEALRRQKGAREAEVLLLQQRVAALAAEKSRVQEKVTEREVVKLQNDPQLEAEYRRLQEEHQREGTLREKQEEELSFLQAKLRRLEKERAMAEGKITVKEVLKVEKDAAVEREVNDLTRQYEDEAAKARSGQREKTELLRKIWALEEENAKVVVQEKVREIVRPDPKAESEVANLRLELVEQERKFRGAEEQLKSYQSELEALRNRGPQVEVKEVTKEVIKYTTDPETEQELQRLREEIMDKTRLIERCDLEIYQLKQEIQALKDTKPQVQTREVVQEILQFQEDPQTKKEVESLRIQLSEEQKKQVDLEGERASQEEKIKRKEEELAQQRKERVVRQEVVQYEDEPDLRAEVTAFTNSIDAELRQIDKLHVELRRLQHRRAELERQLEELERERQARRAAELEVQRLQQRLAALEQEEAKTGEKVTHTQKVVLQQDPQQTREHALLRAQLEEERHRRQLLEGELEPLRRKLAALEKAEIKEKVVFSESVQVEKGDTEQEIQRLKKSLEEESQSKRELDSEVTRLEAKLSELEFYNSKSSKELDFLREENHKLQLERQNLQLETRRLQSEIEMAATETRDLKNITTIDSGTHLNSRLWSLEKELDDLKKMSKDKDLEIDELQRRLGSVAVKREQRENHLRRSIVVIDPDTGRELSPEEAHRAGLIDWKMFVKLRSQECDWEEISVKGPNGESSVIHDRKSGKKFSIEDALQSGRLTAAQYDRYVNKDMSIQELAVLVSGQK

SEQ ID NO: 89 - DNA, 6099 bp, Homo sapiens
  CDS (1)..(6099)
atgttcaaggggctgagcaaaggctcccaggggaaggggtcccccaagggctcccccgccaaggggtcccccaaaggctcccccagcaggcacagccgggctgccacccaggagctggcccttctcatctcccgcatgcaagccaacgccgaccaggtggagcgggacatcctggagacgcagaagaggctgcagcaggaccggctgaacagtgagcagagccaggccctgcagcaccagcaggagacgggccgcagcctgaaggaggctgaggtgctgctcaaggacctcttcctggacgtggacaaggcccggcggctcaagcacccgcaggctgaggagattgagaaggacatcaagcagctgcacgagcgggtgacccaggagtgtgcggagtaccgtgccctgtacgagaagatggtgctgccccccgacgtgggacccagggtcgactgggcacgcgtgctggagcagaaacagaagcaggtctgcgcaggccagtacgggccgggcatggcggagctggagcaacagatcgccgagcacaacatcctgcagaaggagatcgacgcctatgggcagcagctgcggagcctcgtggggccggatgcagccaccatccggagccaataccgagacctactgaaggcggcgtcgtggcgcgggcagagcctgggcagcctgtacacgcacctccagggctgcacgcggcagctgagcgccctggctgagcagcagcgccgcatcctgcagcaggactggagcgacctcatggccgaccctgcgggcgtgcggcgggagtacgagcacttcaagcagcacgagctgctgagccaggagcagagcgtgaaccagctggaggacgacggcgagcgcatggtggagctgcggcaccccgcggtggggcccatccaggcccaccaggaggccctgaagatggagtggcagaacttcctgaacctgtgtatctgccaggagacccagctgcagcacgtggaggactaccgccggttccaggaagaggccgactcagtcagccagaccctggcgaagctcaactccaacttggatgccaagtacagccctgcacctgggggcccccctggcgcccccacagagctgctgcaacagctggaggcagaggaaaaacggctggccgtcaccgagagggccactggggacctgcagcggcgaagccgggatgtggcccctctgccacagcgaagaaacccccctcagcagcccctgcacgtggacagcatctgcgactgggactcaggagaagtgcagctgctgcagggtgagcggtataagctggtagataacactgaaccgcacgcctgggtcgtgcagggccctggcggggagaccaagcgtgctcccgccgcctgcttctgcatcccagcaccagaccctgatgctgtggccagggcctcccggctggcctcagagctgcaggccctgaagcagaaattggccacagtccagagccgcctgaaggccagtgctgtggagtctcttcggcccagccagcaggctccatctggctcagacctggccaacccacaggcccagaagctcctgacacagatgacccggctggatggagacctgggacagatagagaggcaggtgctggcctgggcgcgggccccgctgagccgccccacacccttggaggacttggagggccgcatccacagccatgagggcacagcccagcgcctgcagagcctgggaacggagaaggagacagcccagaaggagtgcgaggcgtttctgtccacgcggcccgtgggccccgctgccctgcagctgcccgtagccctcaacagcgtgaagaacaagttcagtgacgtgcaggttctgtgcagcctctacggggagaaagccaaggctgccctggatctggagcggcagatccaggatgcggacagggtcatccgaggcttcgaggccaccctggtgcaggaggcccccatccctgctgaaccgggggctctgcaggagagggtcagcgagctgcagcgccagcggagggagctgctggaacagcagacctgcgtgctgcggctacaccgcgcgctgaaggcctcggagcacgcatgcgctgccctgcagaacaacttccaggagttctgccaagacctgcctcgccagcagcgccaggtgcgagccctcaccgaccgctaccacgccgtaggggaccagctggacctgcgggagaaggtggtgcaggatgccgccctcacctaccagcagttcaagaactgcaaggataacctgagctcctggctggagcacctgccccgcagccaggtgcggcccagcgacggccccagccagatcgcctacaagctgcaggcgcagaagaggctgacgcaggagatccagagccgagagcgggacagggccacagcatcccacctctcccaggccctgcaggcagcgctccaggactatgagctccaggcagacacctaccgctgctctttggagcccaccctggcagtgtcagcccccaagagaccccgagtggctcccctgcaagagagcatccaagcccaggagaagaaccttgcaaaggcctatactgaggttgcagcagcacagcagcagctgctccagcagctggagtttgctagaaaaatgctggagaagaaggagctcagtgaggacatccgaaggacccatgatgcaaagcagggctccgagagccctgcccaagcagggagagagtcagaggccctgaaggcccagctggaagaggagaggaagcgggtggcccgggtgcagcatgagctggaggcgcagaggagccaactgctgcagctgaggacccagcggcccttggagaggctggaggagaaggaagtggtagagttctaccgggacccccagctggagggcagcctgtccagggtgaaggcccaggtggaggaggagggcaagcggcgggctggcctgcaggcagacctggaagtggcagcccagaaggtcgtgcagctggaaagcaagaggaagaccatgcagcctcatctgctgaccaaggaggtcacccaggtggagagggaccccggcctggacagccaggcggcccagctcaggatccagatccagcagctccgcggggaggatgccgtcatctcggcccggctggaagggctgaagaaggagctactggcccttgagaagagggaggtggacgtgaaggagaaggtcgtggtgaaagaggtagtcaaggtggagaagaatctggaaatggtcaaggcagcccaggctctgaggctgcagatggaggaggatgctgcgcggaggaagcaggcggaggaggctgtggccaagctacaggctcgcatcgaagacctggagcgggctatcagctcggtggagcccaaggtcatcgtgaaggaggtgaagaaggtggagcaggacccagggctcctccaggagtcctccaggctgaggagcctcctcgaggaggagaggaccaagaacgcgacgctggccagggagctgagcgacctgcacagcaagtacagcgtggtggagaagcagaggcccaaagtgcagctccaggagcgcgtccacgagatcttccaggtggatccggagacagagcaggagatcactcggctcaaggccaagctgcaggagatggcgggcaagaggagcggtgtggagaaggaggtggagaagctgctgcccgacctggaggtcctgcgggcccagaagcccacggtggagtacaaggaggtgacccaggaggtggtgaggcatgagaggagccccgaggtgctgcgtgagatcgaccgcctgaaggctcagctcaacgagctcgtcaacagccacgggcgctcccaggagcagctcatccgcctgcagggtgagcgcgacgagtggaggcgcgagcgggccaaggtggagaccaagacggtgagcaaggaggtggtgcgccacgagaaggacccggtgctggagaaagaagcagagcggctccgccaggaggtgcgggaggcggcccagaagaggcgggccgcggaggacgcggtgtacgagctgcagagcaagcgcctgctgctggagaggaggaagcccgaggagaaggtggtggtgcaggaggtggtggtcacccagaaggacccgaagctgcgcgaggagcacagccggctgagcgggagcctggatgaggaggtgggccggcggcgccagctagagcttgaggtgcagcagctgcgggccggcgtggaggagcaggagggcctgctcagcttccaggaggaccgcagcaagaagctggccgtggagagggagctgcggcagctgaccttgaggatccaggagctcgagaagcggcctcccacggtgcaggagaagatcatcatggaggaagtggtcaagctggagaaggacccggacctggagaagtccacggaagccctgcggtgggacctggaccaggagaagacccaggtaaccgagctgaatcgggagtgcaagaacctgcaggtccagattgacgtcctccagaaagccaaatcgcaggagaagaccatctacaaggaagtgatccgggtgcagaaggaccgcgtcctggaagatgagcgggcccgcgtgtgggagatgctcaacagggagcgcacggcccggcaggcccgggaggaggaggcacggcgcctgcgggagcgcattgaccgggccgagacgctggggagaacctggtcccgggaggagtccgagctgcagagggcccgggaccaggccgaccaggagtgtgggcggctgcagcaggagctgcgggctctggagaggcagaagcagcagcagacactgcagctgcaggaggagtcgaagctgctcagccagaagacggagagcgagcgacagaaggcggcccagcggggccaggagctctcgcggctggaggcggccatcctccgcgagaaggaccagatctacgagaaggagcggacgctccgggacctccacgccaaggtgagccgggaggagctcagccaggagacccagacgcgagagaccaacctttccaccaagatctccatcctggaacccgagacggggaaggacatgtccccatacgaggcctacaagaggggcatcatcgacaggggccagtacttgcagctgcaggagctcgagtgtgactgggaggaggtcaccacctcggggccctgtggggaggagtctgtgctcctggaccgcaagagcgggaagcagtactccatcgaggccgccctccgctgccggcgcatctctaaggaggagtaccatctgtacaaggacggccacctgcccatctccgagtttgcgctgcttgtagctggggagaccaagccaagctcctcactctccatcggctctatcatctccaagtccccgctcgcctccccggccccccagagcaccagtttcttctctcccagcttctctctcgggctcggtgatgacagcttccctatcgccgggatctatgacacaaccacagacaacaagtgcagcatcaagacggccgtggccaagaacatgctggaccccatcactgggcagaagctactggaggcccaggcggccacagggggcatcgtggacctgctcagccgtgagcgctactctgtgcacaaggcgatggagaggggcctgatcgagaacacctccacacagaggctgcttaacgcccagaaggccttcaccggcatcgaggaccccgtcaccaagaagaggctctcggtgggcgaggccgtccagaagggctggatgccccgggagagcgtgctcccacacctgcaggtgcagcacctgaccggggggctcatcgaccccaagaggacaggccgcatccccatccagcaggccctcctctccgggatgatcagtgaagagctggcccagctcctgcaggacgagtccagctacgagaaggatttgacagaccccatctccaaggaacggctgagctacaaggaggccatgggccgctgccgcaaagaccccctgagcggcctgctgctcctgccagcggcactggaggggtaccgctgctaccgctccgcctcccccaccgtcccgcgctcccttcgc

SEQ ID NO: 90 - protein, 2033 aa, Homo sapiens
MFKGLSKGSQGKGSPKGSPAKGSPKGSPSRHSRAATQELALLISRMQANADQVERDILETQKRLQQDRLNSEQSQALQHQQETGRSLKEAEVLLKDLFLDVDKARRLKHPQAEEIEKDIKQLHERVTQECAEYRALYEKMVLPPDVGPRVDWARVLEQKQKQVCAGQYGPGMAELEQQIAEHNILQKEIDAYGQQLRSLVGPDAATIRSQYRDLLKAASWRGQSLGSLYTHLQGCTRQLSALAEQQRRILQQDWSDLMADPAGVRREYEHFKQHELLSQEQSVNQLEDDGERMVELRHPAVGPIQAHQEALKMEWQNFLNLCICQETQLQHVEDYRRFQEEADSVSQTLAKLNSNLDAKYSPAPGGPPGAPTELLQQLEAEEKRLAVTERATGDLQRRSRDVAPLPQRRNPPQQPLHVDSICDWDSGEVQLLQGERYKLVDNTEPHAWVVQGPGGETKRAPAACFCIPAPDPDAVARASRLASELQALKQKLATVQSRLKASAVESLRPSQQAPSGSDLANPQAQKLLTQMTRLDGDLGQIERQVLAWARAPLSRPTPLEDLEGRIHSHEGTAQRLQSLGTEKETAQKECEAFLSTRPVGPAALQLPVALNSVKNKFSDVQVLCSLYGEKAKAALDLERQIQDADRVIRGFEATLVQEAPIPAEPGALQERVSELQRQRRELLEQQTCVLRLHRALKASEHACAALQNNFQEFCQDLPRQQRQVRALTDRYHAVGDQLDLREKVVQDAALTYQQFKNCKDNLSSWLEHLPRSQVRPSDGPSQIAYKLQAQKRLTQEIQSRERDRATASHLSQALQAALQDYELQADTYRCSLEPTLAVSAPKRPRVAPLQESIQAQEKNLAKAYTEVAAAQQQLLQQLEFARKMLEKKELSEDIRRTHDAKQGSESPAQAGRESEALKAQLEEERKRVARVQHELEAQRSQLLQLRTQRPLERLEEKEVVEFYRDPQLEGSLSRVKAQVEEEGKRRAGLQADLEVAAQKVVQLESKRKTMQPHLLTKEVTQVERDPGLDSQAAQLRIQIQQLRGEDAVISARLEGLKKELLALEKREVDVKEKVVVKEVVKVEKNLEMVKAAQALRLQMEEDAARRKQAEEAVAKLQARIEDLERAISSVEPKVIVKEVKKVEQDPGLLQESSRLRSLLEEERTKNATLARELSDLHSKYSVVEKQRPKVQLQERVHEIFQVDPETEQEITRLKAKLQEMAGKRSGVEKEVEKLLPDLEVLRAQKPTVEYKEVTQEVVRHERSPEVLREIDRLKAQLNELVNSHGRSQEQLIRLQGERDEWRRERAKVETKTVSKEVVRHEKDPVLEKEAERLRQEVREAAQKRRAAEDAVYELQSKRLLLERRKPEEKVVVQEVVVTQKDPKLREEHSRLSGSLDEEVGRRRQLELEVQQLRAGVEEQEGLLSFQEDRSKKLAVERELRQLTLRIQELEKRPPTVQEKIIMEEVVKLEKDPDLEKSTEALRWDLDQEKTQVTELNRECKNLQVQIDVLQKAKSQEKTIYKEVIRVQKDRVLEDERARVWEMLNRERTARQAREEEARRLRERIDRAETLGRTWSREESELQRARDQADQECGRLQQELRALERQKQQQTLQLQEESKLLSQKTESERQKAAQRGQELSRLEAAILREKDQIYEKERTLRDLHAKVSREELSQETQTRETNLSTKISILEPETGKDMSPYEAYKRGIIDRGQYLQLQELECDWEEVTTSGPCGEESVLLDRKSGKQYSIEAALRCRRISKEEYHLYKDGHLPISEFALLVAGETKPSSSLSIGSIISKSPLASPAPQSTSFFSPSFSLGLGDDSFPIAGIYDTTTDNKCSIKTAVAKNMLDPITGQKLLEAQAATGGIVDLLSRERYSVHKAMERGLIENTSTQRLLNAQKAFTGIEDPVTKKRLSVGEAVQKGWMPRESVLPHLQVQHLTGGLIDPKRTGRIPIQQALLSGMISEELAQLLQDESSYEKDLTDPISKERLSYKEAMGRCRKDPLSGLLLLPAALEGYRCYRSASPTVPRSLR

SEQ ID NO: 91 - DNA, 6108 bp, Mus musculus
  CDS (1)..(6108)
atgttcaaggggctgagcaaaggctcccaggggaaggggtcccccaagggctccccagccaaggggtcccctaaaggctcccccaacaagcacaatcgggctgcaacccaggaactggctctgctcatctcccgcatgcaagccaacgctgaccaggtggaaagagacattttggagacgcagaagaagctgcaacaggatcggcagaatggtgagcagaaccaggctttacaacaccagcaggagactggccgcaacctgaaggaagcggaggtactcctcaaagatctcttcctggatgtagacaaggcgcggcggctcaagcacccacaggctgaggagattgagaaagacatcaagcagctgcatgagcgggtgacccaggagtgctcggagtaccgtgctctgtatgagaagatggtacttccgcctgatgtggggcccagggtcgactgggcgcgtgtgttggagcagaaacagaatctggtccgtgagggccactatgggcctgggatggcagagctggaacagcaggtggccgagcacaacatcctgcagagagaaatcgaggcttacgggcagcagctgcggacgctggtgggaccggatgcaaacaccatcaggaaccaataccgtgagctgctgaaggcggcctcgtggcgccgacagagtctgggcagcctgtacacccacctgcaaggctgcacgaagcagctgagcgccctggccgatcaacaaggccgcatcctgcagcaggattggagtgacctcatgccggaccccgctggcgtgaggcgagagtatgaacacttcaagcagcatgagctgctggcccaggaacggaacataaaccagctggaagatgacgcagatcgcatggtggaacttgggcacccggccattgggcccatccaagtccaccaggaggccctcaagatggagtggcagaatttcctaaacctttgcatctgtcaggagagccagctgcaacgggtggaggactaccgtaggttccaggaagaggcggactcagtcagccagaccctggcaaagctcagctccaacctggataccaagtacggctttggcactggggactcctccggctcccccacagagctcctgctacagctggaggcagaggagaagcagctggccatagcagagagggctgttggagatctgcagcagcgaagccaggaggtggccccactgccacagcgcaggaacccatccaagcagcccctgcacgtggacagcatctgtgactgggactcgggagaagttcagctgcttcggggagagcggtgcacactcaaggataatgctgacccatacacgtggctggttcaaggccctggaggagagaccaaaagtgccccagctgcctgcctgtggatcccagcaccagaccctgaagctgtgggcaaagcctctaggctggccacggagctgcagaccctgaagcagaagctgtctacagagaagaaccgcctgaaggctgctgctgtggaacacttacagcctggccagcaggctccggcaggctcagcccccgctgacccacaaggtcagacgctcctgtcacagatgacccagctggatggggatctggggcagatagagaggcaggtgctgagctgggcccggagcccactgagccagtcttcttcactgaaggacctcgagggccgcatccacagctgtgagggcacagcacagcgccttcagagtctgggagcggagaaggaggcagcccagcaggagtgtgaggcgtttctgtctaccaagcctacgggttccgctgccgtgcaactgcccgtggtcttccacagtgtgaagaacagatacaatgatgtgcagagcctgtgccacctctatggggagaaagccaaggctgctctgggcctggagaagcagatccaggaggcagacagggtcatccaaggctttgaagccgccctggcacttgagggccccgtccccgaaggctctggggcactgcaggagagggtcagcgagctgcagcgccagcgcaaagaactccttcagcagcaggcctgtgtgctggggctgcaccgccagctgaaggccactgagcatgcgtgcagtgcgctgcagaacaatttccaagagttctgccaagacctgccgcgccagcagcgccaggttcgtgccctcactgaccgttaccacgctgtgggggaccagctggatttgagggagaagatagtacaggatgccagcctcacctaccagcagctcaggaacagcagggacaacctgagctcttggctggagcagctgccccaccaccgggtgcagcccagcgacgggccaagccagatttcctacaagctgcaagcacagaagagactgatacaagaaatcctggggcgcgagcaggaccaggccaccgtgtcccgcctcacccgggacctgcaggaggccctccaagactatgagctgcaagcagatacctaccgctgctccttagaacccgccttggcagtgtccgccccgaaagaactcagagtgatttccttgcaggagaacatccaggctcaggagaataaccttgcgaaggcttacactgaggttgccgcagctgagcagcagcagctgcgccagctggagtttgctaaaaagatgctcaggaagaaggaacttgatgaggacatccaagccatccacagcgcgagacagggatctgggagtccggcacacgcaaggacggcggagtcagaggtcctgaagacccagcttgaggaagagaggaagcgggtggctgaggtgcagcgtgacctggaggagcagaggcagcggctgctgcagctgaggacccagcagcctgtggcgcggctggaggagaaggaagtggtggaattctaccgggacccccagctggagagtaacctgtctcaggcagcatcccgggtggaggaagagggcaagaggcgggcccgcttgcaggccgagctggaggcggtggcccagaaggttgtccacttggagggcaagaggaagaccatgcaacttcacctgctgaccaaagaggtcacccaaatcgagagggaccctggcctggacagccaggttacccagctccacagtgagatgcaacggttgcgcggggagaacggcgtcctcacagccaggctggaagagctgaaggacgagctgctagccctggagcagaaggagatgaacgtgaaggagaaggtcgtggtgaaggaggtggtgaaggtggagaaggatctagaaatggttaaggcggcccagactctgaggctccagatcgaggaagatgctgcacggaggaagggggcgaaggagaccgttgccaagatacaggctcgcatcaaagacctggagcaggcgatcagctcagtggagcccaaggtcattgtgaaggaggtgaagaaggtagagcaggacccgggccttctcaaggaggcttccaggctgagaagcctcctggaggaggagaagaacaacaacgtcgcgttggccagggaactgcaggagctgcaggagaaatacagggtggtggaaaagcagaagcccaaggtgcagctgcaggagcgagtcagcgagatcttccaggtgctcccggagacagagcaggagatccggaggctccgggcccagctgcaggagacaggcagcaagaagagcggcgtggagcaggaggtagagaagctgctgcctgagctggaggtcctgcgggctcagaagcccgtggtggaatataaggaggtgactcaggaggtggtgaggcacgagaagaacccagaggtgctgcgggagatcgaccgtctcaaggctcagctcaacgaactggtcaacaccaacgggcgctctcaggagcagctcatccggctccagggcgaacgcgatgagtggaagcgggaaaggtccaaggtggagaccaagatggtgagcaaagaagtcgtgcggcacgagaaggatccggtgctggagaaggaggccgagaggctccggcaggaggtgcgggaggctgtccagaggaggcgagccacggaggatgctgtgtacgagctgcagaacaagttactgctgctggagaggaggcggcccgaggagcagatagtggtgcaggaggtggtggtcacccagaaggacccgaagctgcgcgaggagcacagccggctgagccgcagcttggatgaggaggtggggcgccggcggcagctggagctggaggtgcggcagctgggcgccagagttgaggaggaggaggccaggctcagcttcgaggaggatcgcagcaagaagctggccgccgagagggagctgcggcaactgaccctgaagatccaggagctggagaagcggccccctgccctgcaggaaaagatcatcatggaggaagtggtcaagttagagaaagatcctgacctggagaggtctacagaagctctgcggcgcgagctggatcaggagaagaaccgcgtgaccgagctgcaccgggagtgccagggtctgcaggttcaggtcgacctcctccagaaaactaaatcacaggagaagaccatatacaaggaagtgatcagggtcgagaaggacccggtgctggagggcgagagggcccgagtgtgggagatccttaaccgggagcgcgcagcccgcaagggccgggaggaggatgtccggagcttgcaggagcggatcgaccgagccgaggctctgaggaggtcctggtcccgcgaggaagctgagctccagagggcccgggaccaggcaagccaggactgcgggcggctgcagagacagctgcgggagctggagcagcagaaacagcagaaagcccggcagctacaggaggaggggaggctgcttagccagaagacggagagcgagcgccagaaggccgcccagtggagccaggcggtcacgcagctcgaggctgccattctccaggaaaaggacaagatctacgagaaagagaggaccctcagggacctgcacaccaaggtgagccgggaggagctcaaccaggagacccagacccgggagaccaacctctccaccaagatctgcatcttggaaccggagaccggcaatgacatgtctccttacgaggcctacaagaggggtgtcatcgacagaggccagtatctccagctgcaggagctggagtgtgactgggaagaagtcacaacctccagcccctgcggggaggagtctgtgctcctggaccgcaagagcgggaagcaatactccatcgaggccgccctccgctgccgccgcatttccaaagaagagtaccacaggtacaaagatggccgcctccccatctccgagtttgccctgcttgtggcaggggagaccaagccgagttcttcactctccattgggtccatcatctccaagtctccagtctgctccccaggcccccagagtaccggcttcttctccccaggcctctcttttgggctcactgaggatagcttccccatcgcggagatcttcgatacaaccacagacaacaagtgtagcatcaaggcagctgtggccaagaacatgctggatcctatcactgggcagaagctgttgaggcccaggcaagccacgggaggcattgttgaccttcttagccgagaacggtactccgtacacaaggcggtggagcggggactcattgagaacacctccactcaacggctgctcaatgctcagaaggccttcaccggcatcgaggaccctgtcaccaggaagaggctgtcggtgggtgaggccatccagaagggctggatgccccaggaaagcgtgcttccccacctgctggtacagcacctgactgggggcctcatcgaccccaagaggacgggacgcatccccgtccctcaggctgtgctctgcgggatgatcagcgaagacctgggccagctcctgcaagatgaatccggctacgagaaggatctgacagaccccatcaccaaggagaggctgagctacaaggaggccatggggcgctgccgcaaagatcctctaagtggcctactactgctccccgccatgctagaaggctatcgctgctaccgcgcggcctcccccaccctgccaagatcctgtgtgcgttga

SEQ ID NO: 92 - protein, 2035 aa, Mus musculus
MFKGLSKGSQGKGSPKGSPAKGSPKGSPNKHNRAATQELALLISRMQANADQVERDILETQKKLQQDRQNGEQNQALQHQQETGRNLKEAEVLLKDLFLDVDKARRLKHPQAEEIEKDIKQLHERVTQECSEYRALYEKMVLPPDVGPRVDWARVLEQKQNLVREGHYGPGMAELEQQVAEHNILQREIEAYGQQLRTLVGPDANTIRNQYRELLKAASWRRQSLGSLYTHLQGCTKQLSALADQQGRILQQDWSDLMPDPAGVRREYEHFKQHELLAQERNINQLEDDADRMVELGHPAIGPIQVHQEALKMEWQNFLNLCICQESQLQRVEDYRRFQEEADSVSQTLAKLSSNLDTKYGFGTGDSSGSPTELLLQLEAEEKQLAIAERAVGDLQQRSQEVAPLPQRRNPSKQPLHVDSICDWDSGEVQLLRGERCTLKDNADPYTWLVQGPGGETKSAPAACLWIPAPDPEAVGKASRLATELQTLKQKLSTEKNRLKAAAVEHLQPGQQAPAGSAPADPQGQTLLSQMTQLDGDLGQIERQVLSWARSPLSQSSSLKDLEGRIHSCEGTAQRLQSLGAEKEAAQQECEAFLSTKPTGSAAVQLPVVFHSVKNRYNDVQSLCHLYGEKAKAALGLEKQIQEADRVIQGFEAALALEGPVPEGSGALQERVSELQRQRKELLQQQACVLGLHRQLKATEHACSALQNNFQEFCQDLPRQQRQVRALTDRYHAVGDQLDLREKIVQDASLTYQQLRNSRDNLSSWLEQLPHHRVQPSDGPSQISYKLQAQKRLIQEILGREQDQATVSRLTRDLQEALQDYELQADTYRCSLEPALAVSAPKELRVISLQENIQAQENNLAKAYTEVAAAEQQQLRQLEFAKKMLRKKELDEDIQAIHSARQGSGSPAHARTAESEVLKTQLEEERKRVAEVQRDLEEQRQRLLQLRTQQPVARLEEKEVVEFYRDPQLESNLSQAASRVEEEGKRRARLQAELEAVAQKVVHLEGKRKTMQLHLLTKEVTQIERDPGLDSQVTQLHSEMQRLRGENGVLTARLEELKDELLALEQKEMNVKEKVVVKEVVKVEKDLEMVKAAQTLRLQIEEDAARRKGAKETVAKIQARIKDLEQAISSVEPKVIVKEVKKVEQDPGLLKEASRLRSLLEEEKNNNVALARELQELQEKYRVVEKQKPKVQLQERVSEIFQVLPETEQEIRRLRAQLQETGSKKSGVEQEVEKLLPELEVLRAQKPVVEYKEVTQEVVRHEKNPEVLREIDRLKAQLNELVNTNGRSQEQLIRLQGERDEWKRERSKVETKMVSKEVVRHEKDPVLEKEAERLRQEVREAVQRRRATEDAVYELQNKLLLLERRRPEEQIVVQEVVVTQKDPKLREEHSRLSRSLDEEVGRRRQLELEVRQLGARVEEEEARLSFEEDRSKKLAAERELRQLTLKIQELEKRPPALQEKIIMEEVVKLEKDPDLERSTEALRRELDQEKNRVTELHRECQGLQVQVDLLQKTKSQEKTIYKEVIRVEKDPVLEGERARVWEILNRERAARKGREEDVRSLQERIDRAEALRRSWSREEAELQRARDQASQDCGRLQRQLRELEQQKQQKARQLQEEGRLLSQKTESERQKAAQWSQAVTQLEAAILQEKDKIYEKERTLRDLHTKVSREELNQETQTRETNLSTKICILEPETGNDMSPYEAYKRGVIDRGQYLQLQELECDWEEVTTSSPCGEESVLLDRKSGKQYSIEAALRCRRISKEEYHRYKDGRLPISEFALLVAGETKPSSSLSIGSIISKSPVCSPGPQSTGFFSPGLSFGLTEDSFPIAEIFDTTTDNKCSIKAAVAKNMLDPITGQKLLRPRQATGGIVDLLSRERYSVHKAVERGLIENTSTQRLLNAQKAFTGIEDPVTRKRLSVGEAIQKGWMPQESVLPHLLVQHLTGGLIDPKRTGRIPVPQAVLCGMISEDLGQLLQDESGYEKDLTDPITKERLSYKEAMGRCRKDPLSGLLLLPAMLEGYRCYRAASPTLPRSCVR

SEQ ID NO: 93 - DNA, 6114 bp, Bos taurus
  CDS (1)..(6114)
atgttcaaggggttgagcaaaagctctcaggggaaggggtcccccaagggctccccggccaaaggctcccccaaggggtcccccaacaagcacagcagagctgccactcaggagctggccctgctgatctcccgcatgcaggccaacgccgaccaggtggagagggacattctggagacccagaagaagctgcagcaggaccggcagcacagcgagcagcgccaggccctgcagcaccggcaggaggtgggccgcagcctgaaggaggccgaggtgctgctgaaagacctcttcctggatgtggacaaggcccagcggctcaagcacccacaggccgaggagatcgagaaggacatcaagcagctgcacgagcgggtgacccaggagtgcgccgagtaccgcgccctgtacgagaagatggtgctgccgcccgatgtggggcccagggtcgactgggcgagggtgctggagcagaagcagaagcaggtctgcgagggccagtacgggccgggcatggcggagctggagcagcaggtcgccgaacacaatatcctgcagaaggagatcgaggcctacgggcagcagctgcggacccttgtagggccggacgcggccaccatccggagccaataccgggacctcctgaaggcggcctcgtggcgagggcagagcctgggcagcctgtacacgcacctgcagggctgcacgcgccagctgaacgccctggcccagcagcagcagcgcatcctccagcaagactggagcgaccacctggccgaccccgcgggcgtgcggagggagtacgagcacttcaagcagcacgagctgctgagccaggagcagcgcgtgaaccagctggaggacgacggggagcgcatggtggagctcgggcatccggccgtggggcccatccaggcccaccaggaggccctaaaggtggagtggcagaacttcctgaacctttgcatctgccaggagagccagctgcagcacgtggaggactaccgcaggttccaggaagaggcggattctgtcagccagaccctggcaaagctcaactccagcctggacagccagtacagccctgccccggagggcccacctggtgctctaatggagatgctgcggcagctggaggcagaggagaagcagctgaccatggccgaaaagactctcaaggacctgcagctgcaaagccagggggtggcccctctgccccagagaaggaacctgcccctgcagcccctgcgtgtggacagcatctgtgactgggactcaggagaagtgcagctgctgcggggtgagcagtatacactggtggacaacactgacccacacacctgggtggtccagggccaggcaggcgagcccaagcgggccccagccgcctgcttctgcatcccagctccggaccctgaagccgtggccagggcctccgggcttgcctcggagctgcaggcactgaagcagaaactgaccgcagtccagagccgcctgaaggccagtgccaaggagcccttacggcccagccagcaggctccaagcagctcgggcccacccgacccacaggcccagaagctcctgacacagatgacccggctggaagaggacctggggcagatagagaagcagctgctggcttgggcacgggccccgctgagccgcaccacaccactcgaggacctcgagggccgcatccagaaccaccagggcacggcccagcggctgcagagcctgggagcagagaaggaggcggcccagcagaagtgtgaggcgtttctgtcggggcagccctcagggcccgctgccctgcatctgcccgtggtcctcaacagcgtcaagaacaaatacagggatgtgcaggttctctgcagcctctacggggagaaagccaaggccgccctgggtctggaacggcagatccgggatgcagacaaggtcatccgaggcttcgagtctgccctggcacaggaggcccccatccccgcaggcccgggcgcactgcaggagagggtcagcgagctgaagcgccggcggagggagctgctggagcagcaggcctgtgtgctcgggctacaccgccagctgaaggctgtcgagcatatgtgcagcgcactgcagaacaatttctgcgagttctgcaaagacctgcctcaccagcagcgccaggtgcgggccctcaccgaccgctaccacgccgtgggggaccagttggacctgcgggagaagatgatgcaggatgccggcctcacctaccagcagttcaagaactgcacagacaacctgaacgcgtggctggagcgcctgccccacaacaaggtgcggcccagcgacgggcccagccagatcgcctacaagctgcaggcgcagaagacctgggttcaatccctgggtcgggaagatctcctggagaaggaaatggcaacccactccagtattcccagtctatgtccttccccacctgctcaggactatgagctgcaggcagacacctaccgaggttccctggagcccacccaggtgggatcggcccccaagagaccgcgagttgcgcccctgcaggacagcatccaagcccaggagaagaacctgacgaaggcctacactgaggtggcagctgcccaccagcagcaactgcaccagctggaatttgccagaaagattctggagaagaaagagctcaatgaggacatccaggtgacacctaacgcccagcaggggtctgagagcccagcccgggggggcaggaagtcagaggccctgaggtcccagctagaggaggagaggaagcgggtggcccaggtacaacgtgagctggaggagcagaggagccagttgctgcagctgaagacccagcggcccgtggagaaactggaggagaaggaagtggtggagttctaccgggatccccagctggagagcaacctgtccagggtgaagtcccaggtggaggacgagggcaagaagcaggctggcctgcaggcagacctggaggcagtggcccagaaggtcatgcagctggagagccagaggaaggccacggaacctcacctgctgaccaaggaggtcacccagatcgagagggaccccggcctggacagccaggcagcccagctcaagagtgagctccagctcctgcaagaggagaacaccgccgtcttggcccagctggaggcactgaaggcagagctgctggcccttgagcagaaggaggtgaacgtgaaagagacagtcgtggtgaaagaagtggtcaaggtggagaaggacctggagatgctccaggcagcccaggccctgaggctgaagattcaggaggatgtggcccagcggaaaggggcggaggatgccgtggccaagctgcaggctcgagtcgtggagctggaggcagcaatccgcactgtggagcccaaggtgattgtgaaggaggtgaagaaggtggaacaggaccccaggctcctccaggaggcatccaggctgaggagcctcctggaggtgcagaggagtgaaaacgaggtgctggccagggaggagctgaaggagctgcacagcaagcacagcgcggcggagaagcagaagccccgggtggatctgcaggagcgcgtacaggagaccttccgggtggacccggagacagagcgggagatcgcacagctccgggctgagctgcaggagactggccgcaagaggaatggcacggagcaggaggtggagcgactgctctctgagctggtggtgctgcgggcccagaagcccaccgtggagtacaaggaggtgacgcaggagctggtgcggcacgagaagaaccccgagctgctgcgggagatcgaccgcctgaaggcccagctcaatgagctggtcaacggcagtggacgggcccaggagcagctcatccggctgcagggggagcgcgacgagtggcggcgcgaacgctccaaggtcgagaccaagacggtgaacaaggaggtggtgcgccgtgagaaggaccccgtcctggagcaggaagcccagcggctgcgccaggaggtgcgggaggccactcagaagcggcgggcggccgaggacgccgtccaccagctgcagaacaagtacctgctgctggagaggcggcggcctgaggagagggtggtggtgcaggaggtggtggtcacccagaaggacccgaagctccatgaggagcacagccggctgagccagagcttggatgaggaggccggccggcggcggcagctggaacgggaggtgcagcagctgcaggccgccgtgcaggaggacgagggccgactcagcttccgggaggaccgtagtaagaagctggctgtggagagggagctgcggcagctgaccctgaagctccaggagctggagaagcggcctccggcagtgcaggagaagatcatcatggaggaggtagtccagctggagaaggacccggacctggagaagtccacggcggccctccggcaagacctggcccaggagaagacccaggcgaccgaggtgcatcgggagtgcaagaaccttcaggtgcagatcgacgtgctccagaagacgaagctgcaggagaagaccatctacaaggaagtgatcagggtggagaaggaccccgtgctggagggagagcgtgcccgggtgtgggaggcgctcaaccgggagcgcgcggcccgggagagccgggaggaggaggtgaggcgcctgcgggagcgggtggagcgggccgaggcgctggggaggacctgggctcgggaggaggccgagctccagaagacccgggaccgggcaagccaggagtgcaggcagctgcagcaggagctgcgggagctggaaaggcagaagcagcagcgggtgctgcacctgcaggaggagtccaagctgctcagccagaagacggagagcgagcggcagagggcagcccagcggggccaggaactctcgcagctcgagtcggccatcctccgcgagaaggaccggatctatgagaaggagcggaccctgcgggacctccacacccaggtgagccgggaggagctcaaccaggagacccagacacgagagaccaacatctccaccaagatctccatcctggagcccgagacggggaaggacatgtccccatacgaggcctacaagaggggcgtcattgaccgaagccagtacctccagctgcaggatctcgagtgtgactgggaggaggtcaccacctcgggcccccacggggaggagtctgtgctcctggaccgcaagagcgggaaacagtactccatcgaggccgccctgcgcagccggcgcatctccaaagaggagtaccatctctacaaggatggccagctccccatcagcgaattcgctctgctcgtggccggggagaccaagccctgcccctccctctccatcggcgccatcatctccaagtccccgctggcctccccggcctcccagagcaccagtctcttctcccccagcttctctctcgggcttagcgaggacagcttccccatcgccggtgtctatgacacgaccacagacaacaagtgcaccatcaagacggccgtggccaagaacatgctggaccccatcaccgggcagaagctgctggaggctcaggcggccacggggggcattgtggacctcctgagccgggagcgctactccgtgcacaaggcggtggagcgggggctgatcgagagcggctcaacccagaggctgctcaacgcacagaaggccttcacgggcattgaggaccccgtgaccaagaagaggctgtcggtgggcgaggccgtccagaagggctggatgccccaggaaagcgtgctcccacacctgcgggtgcagcacctgaccggggggctcatcgaccccaagaagaccggccgcatccccgtggctcaggctgtgctctctggcatgatcagcgaggagctggcccagctcctgcaagacgaggccagttacgagaaggacttgacagatcccatttccaaggagcgactgagctacagggaggccatggggcgttgccggaaggaccccctgagcggcctgctgctcctcccagcctcgctagaggggtaccgctgctaccgctcggcctcccccactgtcccgcgctccctgcgt

SEQ ID NO: 94 - protein, 2038 aa, Bos taurus
MFKGLSKSSQGKGSPKGSPAKGSPKGSPNKHSRAATQELALLISRMQANADQVERDILETQKKLQQDRQHSEQRQALQHRQEVGRSLKEAEVLLKDLFLDVDKAQRLKHPQAEEIEKDIKQLHERVTQECAEYRALYEKMVLPPDVGPRVDWARVLEQKQKQVCEGQYGPGMAELEQQVAEHNILQKEIEAYGQQLRTLVGPDAATIRSQYRDLLKAASWRGQSLGSLYTHLQGCTRQLNALAQQQQRILQQDWSDHLADPAGVRREYEHFKQHELLSQEQRVNQLEDDGERMVELGHPAVGPIQAHQEALKVEWQNFLNLCICQESQLQHVEDYRRFQEEADSVSQTLAKLNSSLDSQYSPAPEGPPGALMEMLRQLEAEEKQLTMAEKTLKDLQLQSQGVAPLPQRRNLPLQPLRVDSICDWDSGEVQLLRGEQYTLVDNTDPHTWVVQGQAGEPKRAPAACFCIPAPDPEAVARASGLASELQALKQKLTAVQSRLKASAKEPLRPSQQAPSSSGPPDPQAQKLLTQMTRLEEDLGQIEKQLLAWARAPLSRTTPLEDLEGRIQNHQGTAQRLQSLGAEKEAAQQKCEAFLSGQPSGPAALHLPVVLNSVKNKYRDVQVLCSLYGEKAKAALGLERQIRDADKVIRGFESALAQEAPIPAGPGALQERVSELKRRRRELLEQQACVLGLHRQLKAVEHMCSALQNNFCEFCKDLPHQQRQVRALTDRYHAVGDQLDLREKMMQDAGLTYQQFKNCTDNLNAWLERLPHNKVRPSDGPSQIAYKLQAQKTWVQSLGREDLLEKEMATHSSIPSLCPSPPAQDYELQADTYRGSLEPTQVGSAPKRPRVAPLQDSIQAQEKNLTKAYTEVAAAHQQQLHQLEFARKILEKKELNEDIQVTPNAQQGSESPARGGRKSEALRSQLEEERKRVAQVQRELEEQRSQLLQLKTQRPVEKLEEKEVVEFYRDPQLESNLSRVKSQVEDEGKKQAGLQADLEAVAQKVMQLESQRKATEPHLLTKEVTQIERDPGLDSQAAQLKSELQLLQEENTAVLAQLEALKAELLALEQKEVNVKETVVVKEVVKVEKDLEMLQAAQALRLKIQEDVAQRKGAEDAVAKLQARVVELEAAIRTVEPKVIVKEVKKVEQDPRLLQEASRLRSLLEVQRSENEVLAREELKELHSKHSAAEKQKPRVDLQERVQETFRVDPETEREIAQLRAELQETGRKRNGTEQEVERLLSELVVLRAQKPTVEYKEVTQELVRHEKNPELLREIDRLKAQLNELVNGSGRAQEQLIRLQGERDEWRRERSKVETKTVNKEVVRREKDPVLEQEAQRLRQEVREATQKRRAAEDAVHQLQNKYLLLERRRPEERVVVQEVVVTQKDPKLHEEHSRLSQSLDEEAGRRRQLEREVQQLQAAVQEDEGRLSFREDRSKKLAVERELRQLTLKLQELEKRPPAVQEKIIMEEVVQLEKDPDLEKSTAALRQDLAQEKTQATEVHRECKNLQVQIDVLQKTKLQEKTIYKEVIRVEKDPVLEGERARVWEALNRERAARESREEEVRRLRERVERAEALGRTWAREEAELQKTRDRASQECRQLQQELRELERQKQQRVLHLQEESKLLSQKTESERQRAAQRGQELSQLESAILREKDRIYEKERTLRDLHTQVSREELNQETQTRETNISTKISILEPETGKDMSPYEAYKRGVIDRSQYLQLQDLECDWEEVTTSGPHGEESVLLDRKSGKQYSIEAALRSRRISKEEYHLYKDGQLPISEFALLVAGETKPCPSLSIGAIISKSPLASPASQSTSLFSPSFSLGLSEDSFPIAGVYDTTTDNKCTIKTAVAKNMLDPITGQKLLEAQAATGGIVDLLSRERYSVHKAVERGLIESGSTQRLLNAQKAFTGIEDPVTKKRLSVGEAVQKGWMPQESVLPHLRVQHLTGGLIDPKKTGRIPVAQAVLSGMISEELAQLLQDEASYEKDLTDPISKERLSYREAMGRCRKDPLSGLLLLPASLEGYRCYRSASPTVPRSLR

SEQ ID NO: 95 - DNA, 6087 bp, Canis familiaris
  CDS (1)..(6087)
atgttcaagggtctgagcaaaggctcccaggggaaagggtcccctaagggctcctcagccaagggctcccccagcaagcacagccgggctgccacccaggagttggccctgctcatctcccgcatgcaggccaatgctgaccaggtagagagggacattctggagacccagaagagactgcagcaggaccggctgcacagcgagcagagccaggccctgcagcacaggcaggaagtggggcgcagcctgaaggaggctgaggtgctgctgaaagacctcttcctggatgtggataaggcgcggcggctcaagcacccacaggccgaggagattgagaaggacatcaagcagctgcacgagcgagtgacccaagagtgtgccgagtaccgcgccctgtatgagaagatagtgctgccacccgatgtggggcccagggtcgactgggcgcgtgtgctagagcagaaacagaagcaggtctgcgagggccagtacgggccgggcatggcagagctggagcagcagattgcggagcacaacatcctgcagaaggagattgaggcctacgggcagcagctccggaacctcatcgggccggacgcagctaccatcaggagccaataccgggacctcctgaaggcggcctcgtggcgcggccagagcctgggcagcctgtacacgcaccttcagggctgcacgcgccagctgagtgccctggcccagcagcagcagggcatcctgcagcaggactggagcgacctcctggcggacccccagggcgtgcggcgggagtacgagcacttcaagcagcaggagctgctgagccaggagcagagcgtgaaccagctggaggatgacggggagcgcatggtggagctggggcacccggctgtggggcccatccagacccaccaggaggccctgaagatggaatggcagaactttctaaacctctgcatctgccaggagagccagctgcagcacgtggaggcctaccaccggttccaggaagaggccgactccgtgagccaaaccctggcgaagctgaactccagcctggacacccagtacagcccagcccctggggcgccccctggcgccctcacggagctgctgcagcagctggaggcagagaagaagcatctggctgtcactgagaagaccattagggacctgcagcggcagagccagcaggtggcccctctgcagcagcgcagaaacccaccccagcagcccctgcacgtggacagcatctgtgactgggactcaggagaagtgcagctgctgcggggcgaacggtatttgctgatggacaacactgaccagcacacctgggtcgttcagggtccagatggggagaccaaacgtgccccagccgcctgcttctgcatcccagctccggaccctgacgctgtggccagggcctccaagctggcgtcggagctgcaggccctgaagcagaaattggccgcagtccagagcgagctgacagcctgtgctgagcagcccttacagaccagccagcaggctcccactggctcagccccagaagacccacaggcccagaagctcctgacacagatgacccagctggatggagacctgaagcagatagagaggcaagtactggcctgggcccggaccccgctgagccgcacgacacccctggaagacctggagggccgcatccagagccataaggaaacagcccagcggctgcagggcctgggagcagagaaagaaacagcccagcaggagtgtgaggcgttgctgtccgcccggcctgggggccccgctgccctgcagctgcccgtggccctcaacagtgtcaagaacaagtacagtgacgtgcagattctttgcaacctctacggggagaaagccagagctgccctgggtctggagcgccggatccaggacgcggacagggtcatccgaggcttcgagtccactgtggcgcaggagggccccatccccgccagccccggggcactgcaggagagggtcaatgagctacagcgcctgcggagggagctgctggaaaagcaggcctgtgtgctggggctgcaccgcgagctgaaggccaccgagcatgcatgcagcgccctgcagaacaacttccaggagttctgccaagacctgcctcgccagcagcgccaggcccgggcccttaccgaccgctaccacgctgtgggggaccagctggacctgcgggagaagatgttgcaggatgttggcctcacctaccagcagttcaagaattacttggacaatctgagcttctggctggaaaacctgccccgcaatgaagtgcggcccagcgatgggcccagccagctcgcctacaagctgcaggcacagaagaggctgcagcaggagatccagggccgagagcaggacagggccatggcatcccgcctctcccaggacctgcaggcagctctccaggactatgagttgcaggcagacacctaccgctgctccctagagaccaccacccaggcagggtcagcccccaagagaccccgagtggctcccctgcaggagagcatccaggagcaggagaagagcctgacaaaggcctatactgaggttgcggctgcacaccagcagcagctgcatcagctggagtttgccagaaggatgctggagaagaaggagctcagtgaggatgtccaggtgacccatgatgcacagcaggggtctgagagcccagcccaagcaaggaaggagtcagaggccctaaagtcccagctggaggaggagaggaagcgggtggcccaggtgcagcaacagctggaggaacagcggaaccagctgctgcagctgagaacccagcgccccttggagaggctagaagagaaggaagtggtagagttttaccgggacccccaactggagagcagcctgtccagggtaaagtcccaggtagaggaggaaggcaagaagcgggccggcctgcaggcggacctggaggcagcagcccagaaggtcgtccagctggagagcaagaagagggccatgcaacctcacctgctgaccaaggaggtaacccagatcgagagggaccctgacctggagagccaggcagcccagctcagcagcgagatcctgcagctgcggggggagaatgccaccgtctcggcccggctcgaggtgctaaagaaggagctgctggccctggagcagaaggagccgaatgtgaaggagagggtcgtggtgaaagaagtggtcaaggtggagaaggacctggaaatgcttaaggcagcccaggccctccggctgcagctggaggaggactctgcgcggaggaagggggcggaagaggctgtggccaagctgcgggcacgcattgaagagctagagcgggcgatcggtgccgtggagcccaaggtgatcgtgaaggaggtgaagaaggtggagcaggacctgggcctcctggaagaggcgtccaggctgaggaacctcctagaggaggccaggagcaggaacgccacgctggcgcgcgagctggaggacgtgcggggcaagtacagcgtggtggagaagcagaagcccaaagtggagctccaggagcgcatccacgagaccttccaggtggctccggagacgcagcaggagatcgcgcggctccgggcccagctgcaggacaccgccagcaggaggagcggcgtagagaaggagctggaggggctgctgcccgagctggccgccctccgtgcccagaagcccgcggtggagtacaagcaggtgacgcaggaggtggtgaagcacgagaggagtcccgaggtgctgcgggagatcgaccgcctgaaggcccagctgaatgagctggtaaacggcagcgggcgggcccaggagcagctcatccggctgcagggggagcgcgacgagtggaggcgggagcggtccaaggtggagaccaagacagtgaacaaggaggtggtgcgccacgagaaggaccctgtcctggagaaggaggccgagcggctgcgccaggaggttcgagaagccacccagaggaggcgggccaccgaggacgtggtctccgagctgcagaaccggtacctgctgctggagaggaggcggcccgaggagagggtggtggtacaggaggtggtggtcacccagaaggacccgaagctccgagaggaccacggccggctgagccagagcctggacgaggaggcgggccggcggcggcagctggagcgggaggtgcagcagctccgggctggtgtgcaggagaaggagagcctgctcagcttccaggaggaccggaccaagaagctggccgtggagagggagctgcggcagctgaccctgcggatccaggagctcgagcagcggcctcctgcggtgcaagagaagatcatcatggaggaggtggtcaagctggagaaagacccggatctggagaagtccacagaagccctgcggcaggacctggagcaggagaagacccgggtgacagagctgcatcgggagtgcaagaacctgcaggtgcagatcgacgtcctccagaccacgaaatcgcaggagaagaccatctacaaggaagtgatccgggtagagaaggaccgggtgctggagggcgagcggtcccgggcgtgggaggcgctcaaccgggagcgcggggcccggcagagccgggaggaggaggtgcggcacctccggcagcggctggacggggccgaggcgctgaggaggacccgggcccgcgaggaggctgagctccagaggtcccgggcccaggcggaccaggagcaccggcagctgcggcaggagctgcgggagctggagaggcggaagcagcagagggcgctgcacctgcaggaggaggcgaagctgctcagccagaggacggacggcgagcggcagaaggcggcccagcggggccaggagctctcgcagctcgaggcggccatcctccgcgagaaggaccagatccacgagaaggagaggacgctgcgcgacctccgcgccagggtgagcagggaggagctcaaccaggagacccagacgcgagagaccaacctctccaccaagatctccatcttggaacccgagacggggaaggacctgtccccgtatgaggcctacaagcagggcatcatcgatcggggccagtacctccagctccaggagctcgagtgtgactgggaggaggtcaccacctcgggcccctgcggcgaggagtccgtgctgctggaccgcaagagcgggaagcagtactccatcgaggcggccctgtactgccggcgcatctccaaggaggagtaccacctctacaaggacggccagctgcccatctccgagttcgcgctgctcgtggcaggggagaccaagccctgctcctcgctctccattggctccatcatctccaagtccccactcgcctccccagccacccagggctccggtttcttctccagcggctcccttgggctcagcgatgacagcttccccatcgctggcatctatgacacgaccacggacaacaaatgcagcatcaagacggccatggccaagaacatgctggaccccatcacggggcagaagctgctggaggcccaggcggccacagggggcatcgtggacctcctcagccgggagcgctactccgtgcacaaggccatggaaagggggctgatcgagaacacctcgacacagaggctgctcaacgcccagaaggccttcaccggcatcgaggatcccgtcaccaggaagaggctgtcggtgggcgaggccgtgcagaagggctggatgccgcgggagagcgtgctcccacacctgcaggtccagcacctgaccgggggactcatcgaccccaagaggaccggccgcatccctgtccctcaggccgtgctctccggaatgatcagtgaagagctggcccagctcctgcaggatgagtccggctatgagaaggatttgacagaccccatctccagggagcggatgagctacaaggaggccatggggcgctgccggagagaccccctgagcggcctgctgctgctcccagccacgctggaggggtaccactgctaccgctccgcctcccccagggcgctgcgctccctgcgc

SEQ ID NO: 96 - protein, 2029 aa, Canis familiaris
MFKGLSKGSQGKGSPKGSSAKGSPSKHSRAATQELALLISRMQANADQVERDILETQKRLQQDRLHSEQSQALQHRQEVGRSLKEAEVLLKDLFLDVDKARRLKHPQAEEIEKDIKQLHERVTQECAEYRALYEKIVLPPDVGPRVDWARVLEQKQKQVCEGQYGPGMAELEQQIAEHNILQKEIEAYGQQLRNLIGPDAATIRSQYRDLLKAASWRGQSLGSLYTHLQGCTRQLSALAQQQQGILQQDWSDLLADPQGVRREYEHFKQQELLSQEQSVNQLEDDGERMVELGHPAVGPIQTHQEALKMEWQNFLNLCICQESQLQHVEAYHRFQEEADSVSQTLAKLNSSLDTQYSPAPGAPPGALTELLQQLEAEKKHLAVTEKTIRDLQRQSQQVAPLQQRRNPPQQPLHVDSICDWDSGEVQLLRGERYLLMDNTDQHTWVVQGPDGETKRAPAACFCIPAPDPDAVARASKLASELQALKQKLAAVQSELTACAEQPLQTSQQAPTGSAPEDPQAQKLLTQMTQLDGDLKQIERQVLAWARTPLSRTTPLEDLEGRIQSHKETAQRLQGLGAEKETAQQECEALLSARPGGPAALQLPVALNSVKNKYSDVQILCNLYGEKARAALGLERRIQDADRVIRGFESTVAQEGPIPASPGALQERVNELQRLRRELLEKQACVLGLHRELKATEHACSALQNNFQEFCQDLPRQQRQARALTDRYHAVGDQLDLREKMLQDVGLTYQQFKNYLDNLSFWLENLPRNEVRPSDGPSQLAYKLQAQKRLQQEIQGREQDRAMASRLSQDLQAALQDYELQADTYRCSLETTTQAGSAPKRPRVAPLQESIQEQEKSLTKAYTEVAAAHQQQLHQLEFARRMLEKKELSEDVQVTHDAQQGSESPAQARKESEALKSQLEEERKRVAQVQQQLEEQRNQLLQLRTQRPLERLEEKEVVEFYRDPQLESSLSRVKSQVEEEGKKRAGLQADLEAAAQKVVQLESKKRAMQPHLLTKEVTQIERDPDLESQAAQLSSEILQLRGENATVSARLEVLKKELLALEQKEPNVKERVVVKEVVKVEKDLEMLKAAQALRLQLEEDSARRKGAEEAVAKLRARIEELERAIGAVEPKVIVKEVKKVEQDLGLLEEASRLRNLLEEARSRNATLARELEDVRGKYSVVEKQKPKVELQERIHETFQVAPETQQEIARLRAQLQDTASRRSGVEKELEGLLPELAALRAQKPAVEYKQVTQEVVKHERSPEVLREIDRLKAQLNELVNGSGRAQEQLIRLQGERDEWRRERSKVETKTVNKEVVRHEKDPVLEKEAERLRQEVREATQRRRATEDVVSELQNRYLLLERRRPEERVVVQEVVVTQKDPKLREDHGRLSQSLDEEAGRRRQLEREVQQLRAGVQEKESLLSFQEDRTKKLAVERELRQLTLRIQELEQRPPAVQEKIIMEEVVKLEKDPDLEKSTEALRQDLEQEKTRVTELHRECKNLQVQIDVLQTTKSQEKTIYKEVIRVEKDRVLEGERSRAWEALNRERGARQSREEEVRHLRQRLDGAEALRRTRAREEAELQRSRAQADQEHRQLRQELRELERRKQQRALHLQEEAKLLSQRTDGERQKAAQRGQELSQLEAAILREKDQIHEKERTLRDLRARVSREELNQETQTRETNLSTKISILEPETGKDLSPYEAYKQGIIDRGQYLQLQELECDWEEVTTSGPCGEESVLLDRKSGKQYSIEAALYCRRISKEEYHLYKDGQLPISEFALLVAGETKPCSSLSIGSIISKSPLASPATQGSGFFSSGSLGLSDDSFPIAGIYDTTTDNKCSIKTAMAKNMLDPITGQKLLEAQAATGGIVDLLSRERYSVHKAMERGLIENTSTQRLLNAQKAFTGIEDPVTRKRLSVGEAVQKGWMPRESVLPHLQVQHLTGGLIDPKRTGRIPVPQAVLSGMISEELAQLLQDESGYEKDLTDPISRERMSYKEAMGRCRRDPLSGLLLLPATLEGYHCYRSASPRALRSLR

SEQ ID NO: 97 - DNA, 1944 bp, Danio rerio
  CDS (1)..(1944)
atggtgtttgatcttcagaacaaatatattcagctggagagacaaaaacctgaggaaaagcttgtagtacaagaggtagtgcgtctacaaaaggatccaaggcagatccttgatcatgacaggttaggaaggagtctagatgaagaagtgaagaataggagaaaactagaactagaggtacagcagctgagagcactcatagaagacaaggaaatagcaatcaggagcagtgatgaaaagcaaaaaaagattcaggtggaaactgagctgagacaaattaaatccagaattcatgagctagaaactgccccacctcctattgaagagaacatagtcatagaggaagttctaaaagttgagagggatccaaaacttgataaactgacaaatggtcttcgcacagatatggataaagaaagcagcgacattatgcgtctagaaagagatatcaggaaattggcacttgatattgaaatcttgcagcgagagaagtcagttgagaagaccatctataaagaggttgttcgtgtagagaaagatcaagcacttgaagcagaacgatcccaccttagagaccagttccttcaggagaaaaatgtcagacgagaccttgaggataaactccatcgtctacaagagaaactacagcaacaagcaagcaaaaaaacggcaatgtcgctggaggagaccaacctagttcatgatcgggacaagctgcaaagagaaaaagaaaaccttcagagagaactgagatcattggaatctgaaagacaaaacatcaccatctccttccaacagcattctaggctgatgagtgaaagaaaccaaatgaacaggcaaagaagcattaaaatggaatcagatggtcagaggctggaaagggatatccttgatgaaaaagacaaaattcacaaacgagataacataattagggagctgaagaacagtttacagaaggaggactcctctgagatgcgcacaaaagaagtcaatgtttccacaaagataagcatcttggaccccaacactggaaaagatatgtcaccatatgatgcctataggcaaggcttcctcgatcgcaacaaatacttgcagttacaagaaatggagtgtgactgggaggaaatcactacaatggcacctgatgatgagatattggttttgcaagatcgcaagagtgggaaacagtactccatcaaaactgcactaaaagaaggcaaggtgaccaaataccaactacaacagtataaggatggcaaaatgtctatttcagagtttgctcttcttgtagctggggaaaaaaaatcatcgtcatacactccacacttcaacagccaattgaatcaacagcttaaagaagagtttcctatatgtggtgtatatgatgtacacacagattcatgtgtaaatgtgcgcagtgccatgagtcgaaagttgattgacaccaacactgcccaaaagcttcttgaagcacaagctgccactggaggtattgtggacatcagcaatggaataaaatattcggtacacaaagcagctgatcgaggtctgattgagtctagtcagctacagaggttactaaatgctcaaaaggccttcaccggagttgaggatcctatgaccaaagaacgtctgtcggtcggagaggctgtacaaaaaggctggatgcccaaagaaaatgccatgagatacatggaggcacaatttctgacaggcgggttggtcaaccccaacaaagcaggaagagttaacattgtggatgcagtcagctctaagatgattgacagtacaatgatgagagagcttcaggaagagatcaattatgcaaaagagctgactgatccaatcacaaaggaaaagatcaactacaaacaggctttggctcgttgtaagatagacccactctcaggccttccgatgtttaatgcttcctcaaaaaatgtc

SEQ ID NO: 98 - protein, 648 aa, Danio rerio
MVFDLQNKYIQLERQKPEEKLVVQEVVRLQKDPRQILDHDRLGRSLDEEVKNRRKLELEVQQLRALIEDKEIAIRSSDEKQKKIQVETELRQIKSRIHELETAPPPIEENIVIEEVLKVERDPKLDKLTNGLRTDMDKESSDIMRLERDIRKLALDIEILQREKSVEKTIYKEVVRVEKDQALEAERSHLRDQFLQEKNVRRDLEDKLHRLQEKLQQQASKKTAMSLEETNLVHDRDKLQREKENLQRELRSLESERQNITISFQQHSRLMSERNQMNRQRSIKMESDGQRLERDILDEKDKIHKRDNIIRELKNSLQKEDSSEMRTKEVNVSTKISILDPNTGKDMSPYDAYRQGFLDRNKYLQLQEMECDWEEITTMAPDDEILVLQDRKSGKQYSIKTALKEGKVTKYQLQQYKDGKMSISEFALLVAGEKKSSSYTPHFNSQLNQQLKEEFPICGVYDVHTDSCVNVRSAMSRKLIDTNTAQKLLEAQAATGGIVDISNGIKYSVHKAADRGLIESSQLQRLLNAQKAFTGVEDPMTKERLSVGEAVQKGWMPKENAMRYMEAQFLTGGLVNPNKAGRVNIVDAVSSKMIDSTMMRELQEEINYAKELTDPITKEKINYKQALARCKIDPLSGLPMFNASSKNV

SEQ ID NO: 99 - DNA, 6213 bp, Rattus norvegicus
  CDS (1)..(6213)
atgttcaaggggctgagcaaaggctctccagccaaggggtcccccaagggctccccagctaaggggtcccctaagggctcccccaacaagcacagtcgggctgcaacccaggaactggctctgctcatctctcgcatgcaagccaatgctgaccaggtagagagggacattttggagactcagaagaagctgcagcaagtcaacaagaacattggggaacttgtggtgagcctttgcgccctgaccacatgggtcatgcctcaccaggatcggcagaatggtgcacagaatcaggcactacagcaccagcaggagacgggccgcaacctgaaggaagcggaggtactcctcaaagatctcttcctggatgtagacaaggctcggcgcctcaagcacccacaggctgaggagattgagaaagacatcaagcagctgcacgaacgagtgacccaggagtgtgcggagtatcgagctctgtatgagaagatagtgctgccgccggatgtggggcccagggtcgactggacacgggtgctggagcagaaacagaagctgatctgtgagggccactatgggcctgggatggcagaactggaacagcaggtggccgagcacaacatcctgcagagggaaatcgaggcttacgggcagcagctgcggacactggtgggaccggatgcaaacgccatcaggaaccaataccgtgacctactgaaggcagcctcgtggcgccggcagagtctgggcagcttgtacacacacctgcagggctgcacgaagcagctgggcgccctggcggatcaacaaggccgcatcctgcagcaggattggagtgacctcatgcctgaccccgctggtgtgaggcgagagtatgagcacttcaagcagcatgagctgctggcccaggaacagagtataaaccagttggaggatgacgcagagcgcatggtcgagctcgggcacccggccattgggcccatccaggcccaccaggaggccctcaaaatggagtggcagaatttcctaaacctgtgcatctgtcaggagagccagctgcagcatgtggaggactaccgaaggttccaggaagaggccgactcagccagccagaccctggcaaagctcagctccaacctggacaccaagtacagctttggcgctggggactcctctgtctccccaacagagctcctgctacagctggaggcagaggagaagcagctggccatagcagagaggactattggagagctgcagcgacgaagccaggaggtggccccgctgccacagcgcaggaacccacccaagcagcccctgcacgtggacagcatctgtgactgggactccggagaagtgcagctgcttcggggagagcggtacacactcaaggataatgctgacccctacacctgggtggttcagggccctggaggagagaccaagagtgccccagctgcctgcctctgcatcccagcaccagacccagaagctgtagccaaagcctccaggttggcctccgagctgcagaccctgaagcagaagctgtctacagagaagagtcgtctcaagaatgcttcagcagagcacttacagcagggccagcagggtaccagaggatgtccagggagggcactggtgggtgggccgtgccgggtagaagctccggcaggctcagccccggctgacccacaggctcagaagctcctgtcacagatgacccagctggatggggatctgggacaggtagagaggcaggtgctgagctgggctcggagcccgttgaacgactcttctccactgaaggacctagagggccgaatccagagctgtgagggcacggcacagcatcttcagaacctgggagctgagaaggaggcagcccagcaggagtgtgaggcgtttctgtcgactaagcctacaggctcagcggccctgcagctgcctgtggtcctcaataatgtcaagaacaagtatagtgatgtgcatagcctgtgctacctctatggggagaaagccaaggctgctctgggcctggagaagcagatccaggaggcagatgggatcatccaaggctttgaagctaccctggcacaggagggccccatccctgaaggctctggggcactgcaggagagggtcagcgagctgcagcgccagcggaaagagctcctccagcagcaggcctgcgtgttggggctgcaccggcagctgaaggccgcggagcacgcgtgcggtgcgctgcagaacaatttccaagagttctgccaggacctgccgcgccagcagcgccaagtgcgagccctcaccgaccgttaccacagcgtgggggaccagctggatttgagggagaagatactacaggatgccagcctcacccaccagcagctcaagaacagcagggacaacctgagctcctggctggagcagctgccccaccaccgtgtgcagcccagcgacgggccaagccagatcgcctacaagctgcaagcacagaagaggctgatacaggaaatcctgggtcgtgagcaggaccaggccacagtggcccgcctcacccgggacctgcaggaggctctccaggagtatgagctgcgagcagacacctaccgctgctccctggagcccaccttggcggtgtccgcccctaagagactcagagtgatttccttaaaggagaacatccaggctcaggagaagaaccttactaaagcttacactgaggtcgccgcagcggaacagcagcagctgcaccagctggagtttgctaagaagatgctggagaagaaggagctcaatgaggacttccaagccatccacagtgcaagacaaggatctggcagtccagcacatacaaagacagagtcagaggtcctgaagacccagctcgaggaagagaggaaacgcgtggctgaggtgcagcgtgaactggaggagcggaggcagcagctgctgcagctgaggacccagcagcctgtggctcggctggaggagaaggaagtggtagagttctaccgggacccccagctaaagagtaacgtgcttcaggcatcgtcccggctggaggaagaaggcaagaggcgagcccgcctacaagccgagctggaggtggtggcccaaaaggttgtccacttggagggcaagaggaaggccatgcagcctcacctgctgaccaaagaggtcacccaaattgagagggaccccggcctggacagccaggttacccagctccacaatgagatgcaggggctgcgtggggagaacgccgtcctcgcagccaggctggaggggctgaaggatgagttgctgaccctggagcagaaggagataaatgtgaaggagaaggtggtggtgaaggaggtagttaaggtggagaaggatctggaaatggtgaaggcggcccagacgctaaggctgcagatcgaggaagatgctgcacggaggaagggggcgaaggaagcagtagccaagacacaggctcgcatcaaagacctggagcaggcgatcagctccgtggagcccaaggtcattgtgaaggaggtgaagaaagtggagcaggaccctgggcttctcaaggaagcctccaggctgagaagcctcctggaggaggagaagaacaagaacgtcatgttggccagggaactgcaggaactgcaggacaagtacagggcggtagagaagcagaagcctaaggtgcagctgcaggagcgcgtcagcgagatcttccaggtgcacccggagacagagcaggagatcctgaggctccgggcccagctgcaggagacaggcagcaagaagagctgtgtggagcgggaggtggagaagctgctgcctgagctggaggtcctgcgggctcagaagcccgtggtggaatataaggaggtgacgcaggaggtggtgaggcacgagaagaacccagaggtgctccgggagatcgaccgcctcaaggctcagctcaatgaactggtcaacacccacgggcgctgtcaagagcagctcatccggctccagggcgaacgcgatgagtggaagcgtgagcggtccaaggtggagaccaagatggtgaacaaagaggtggtgaggcatgagaaggatccagtgctggagaaagaggccgagaggctccggcaggaggtgcgggaggccgtccagaagaggcgagccgccgaggatgctgtctacgagctgcagaacaagtatctgctgctggagaggagacgccccgaggagcagatcgtagtgcaggaggtggtggtcacccagaaggacccgaagctgcacgaggagcacagccggctgagccggagcttggatgaggaggtggggaggcggcggcagctggagctggaggtgcggcagctgagcgccagcgtggaggaggaggaggccatgctcagcttcgaggaggaccgcagcaagaagctggctgcggagagggagctgcggcaactgaccctgaagatccaggagctggagaagcggcctcctgccctgcaggaaaagatcatcatggaggaggtagtcaagttagaaaaggatccggatctggagaggtccacagaagctctgaggcgagagctggatcaggagaagaaccgggtgatcgagctacaccgggagtgcaagggcctgcaggttgaggtcgacctccttcagaaaacgaaatcacaggaaaagaccatatataaggaagtgatcagggtggagaaggacccagtcctggagagcgagagggcccgtgtgtgggaaacccttaaccgggagcgagcagcacgccagagtcgggaggaggatgtccggagcttgaaagagcggatcgaccgagccgaggctctgaggaggtcctggtcactccagaaggcccgggaccaggcaagccaggactgtgggcggctgcagagagagctccgagagctggagcagcagaagctacagaaagcccagcagctacaagaggaggggcggctgcttagccagaagacggagagcgagcgccagaaggccgctcagcggagccaggccctctcacagctcgaggctgccattctccatgaaaaggacaagatatacgagaaggaaaggaccctcagggacctgcacaccaaagtgagccgggaggagctcaaccaggaaacccagacacgggagaccaacctttccaccaagatctgcatcttggaaccagagaccgggaatgacatgtctccctacgaggcctacaagaggggtatcatcgacagaggccagtacctccagctgcaggagctggagtgtgactgggaagaagttaccacctccagtccctgtggggaggagtctgtgctcttggaccgcaagagcgggaagcaatactccattgaggccgccctccgctgccgccgcatctccaaagaagaatatcacaggtacaaagatggccgcctccccatctccgagtttgccctgcttgtggcaggggagaccaagcccagttcctcactctccattgggtccatcatctccaagtccccagtctgctccccaggaccccagagtaccggcttcttctccccaggcctttctttggggctcactgaggatagcttccccatcgctggggtttatgatacaaccacagataacaagtgtagcatcaaggcagctgtggccaagaacatgctggatcccatcactgggcagaagctgttggaggcccaggcagccacaggaggcatcgtagatcttctcagccgagaacgatactccgtacacaaggcagtggagcagggactcattgagaacacctccacccaacgtctgctcaacgctcagaaggccttcaccggcatcgaggacccagtcaccaggaagaggctgtcagtgggtgaggccatccagaagggctggatgccccaggaaagcgtgcttccccacctactggtgcagcaccttactgggggcctcatcgatcccaagaggacaggacgcatccccgtccctcaggctgtgctctgcgggatgatcagcgaagacctaggtcagctcctgcaagacgaatccagctacgagaaggatttgacagaccccatcaccaaggagaggctgagctacaaggaggccatggggcgctgccacaaagatcctctaagtggcctgctacttctcccagccatgctggaaggctaccgctgctaccgagtggcctcccccaccctgcctcgctcctgtgtgcgttga

SEQ ID NO: 100 - protein, 2070 aa, Rattus norvegicus
MFKGLSKGSPAKGSPKGSPAKGSPKGSPNKHSRAATQELALLISRMQANADQVERDILETQKKLQQVNKNIGELVVSLCALTTWVMPHQDRQNGAQNQALQHQQETGRNLKEAEVLLKDLFLDVDKARRLKHPQAEEIEKDIKQLHERVTQECAEYRALYEKIVLPPDVGPRVDWTRVLEQKQKLICEGHYGPGMAELEQQVAEHNILQREIEAYGQQLRTLVGPDANAIRNQYRDLLKAASWRRQSLGSLYTHLQGCTKQLGALADQQGRILQQDWSDLMPDPAGVRREYEHFKQHELLAQEQSINQLEDDAERMVELGHPAIGPIQAHQEALKMEWQNFLNLCICQESQLQHVEDYRRFQEEADSASQTLAKLSSNLDTKYSFGAGDSSVSPTELLLQLEAEEKQLAIAERTIGELQRRSQEVAPLPQRRNPPKQPLHVDSICDWDSGEVQLLRGERYTLKDNADPYTWVVQGPGGETKSAPAACLCIPAPDPEAVAKASRLASELQTLKQKLSTEKSRLKNASAEHLQQGQQGTRGCPGRALVGGPCRVEAPAGSAPADPQAQKLLSQMTQLDGDLGQVERQVLSWARSPLNDSSPLKDLEGRIQSCEGTAQHLQNLGAEKEAAQQECEAFLSTKPTGSAALQLPVVLNNVKNKYSDVHSLCYLYGEKAKAALGLEKQIQEADGIIQGFEATLAQEGPIPEGSGALQERVSELQRQRKELLQQQACVLGLHRQLKAAEHACGALQNNFQEFCQDLPRQQRQVRALTDRYHSVGDQLDLREKILQDASLTHQQLKNSRDNLSSWLEQLPHHRVQPSDGPSQIAYKLQAQKRLIQEILGREQDQATVARLTRDLQEALQEYELRADTYRCSLEPTLAVSAPKRLRVISLKENIQAQEKNLTKAYTEVAAAEQQQLHQLEFAKKMLEKKELNEDFQAIHSARQGSGSPAHTKTESEVLKTQLEEERKRVAEVQRELEERRQQLLQLRTQQPVARLEEKEVVEFYRDPQLKSNVLQASSRLEEEGKRRARLQAELEVVAQKVVHLEGKRKAMQPHLLTKEVTQIERDPGLDSQVTQLHNEMQGLRGENAVLAARLEGLKDELLTLEQKEINVKEKVVVKEVVKVEKDLEMVKAAQTLRLQIEEDAARRKGAKEAVAKTQARIKDLEQAISSVEPKVIVKEVKKVEQDPGLLKEASRLRSLLEEEKNKNVMLARELQELQDKYRAVEKQKPKVQLQERVSEIFQVHPETEQEILRLRAQLQETGSKKSCVEREVEKLLPELEVLRAQKPVVEYKEVTQEVVRHEKNPEVLREIDRLKAQLNELVNTHGRCQEQLIRLQGERDEWKRERSKVETKMVNKEVVRHEKDPVLEKEAERLRQEVREAVQKRRAAEDAVYELQNKYLLLERRRPEEQIVVQEVVVTQKDPKLHEEHSRLSRSLDEEVGRRRQLELEVRQLSASVEEEEAMLSFEEDRSKKLAAERELRQLTLKIQELEKRPPALQEKIIMEEVVKLEKDPDLERSTEALRRELDQEKNRVIELHRECKGLQVEVDLLQKTKSQEKTIYKEVIRVEKDPVLESERARVWETLNRERAARQSREEDVRSLKERIDRAEALRRSWSLQKARDQASQDCGRLQRELRELEQQKLQKAQQLQEEGRLLSQKTESERQKAAQRSQALSQLEAAILHEKDKIYEKERTLRDLHTKVSREELNQETQTRETNLSTKICILEPETGNDMSPYEAYKRGIIDRGQYLQLQELECDWEEVTTSSPCGEESVLLDRKSGKQYSIEAALRCRRISKEEYHRYKDGRLPISEFALLVAGETKPSSSLSIGSIISKSPVCSPGPQSTGFFSPGLSLGLTEDSFPIAGVYDTTTDNKCSIKAAVAKNMLDPITGQKLLEAQAATGGIVDLLSRERYSVHKAVEQGLIENTSTQRLLNAQKAFTGIEDPVTRKRLSVGEAIQKGWMPQESVLPHLLVQHLTGGLIDPKRTGRIPVPQAVLCGMISEDLGQLLQDESSYEKDLTDPITKERLSYKEAMGRCHKDPLSGLLLLPAMLEGYRCYRVASPTLPRSCVR

SEQ ID NO: 101 - DNA, 1686 bp, Pan troglodytes
  CDS (1)..(1686)
atgttcaaggggctgagcaaaggctcccaggggaaggggtcccccaagggctcccccgccaaaggggtcccccaaaggctcccccagcaagcacagccggaccggctgaacagtgagcagagccaggccctgcagcaccagcaggagacgggccgcagcctgaaggaggccgaggtgctgctcaaggaccttttcctggacgtggacaaggcccggcggctcaagcacccgcaggctgaggagattgagaaggacatcaagcagctgcacgagcgggtgacccaggagtgtgcggagtaccgtgccctgtacgagaagatggtgctgccccccgacgtgggacccagggtcgactgggcacgcgtgctggagcagaaacaggcccaccaggaggccctgaagatggagtggcagaacttcctgaacctgtgtatctgccaggagacccagctgcagcacgtggaggactaccgccggttccaggaagaggccgactcagtcagccagaccctggcgaagctcaactccaacttggatgccaagtacagccctgcacctgggggcccccctggcgcccccacagagctgctgcaacagctggaggcagaggaaaaacggctggccatcaccgagagggccactggggacctgcagcggcgaagccaggatgtgccccctctgccacagcgaagaaacccacctcagcagcccctgcacgtggacagcatctgcgactgggactcaggagaagtgcagctgctgcggggtgagcggtataagctggtagataacactgacccgcacacctgggtcgtgcagggccctggtggggagaccaagcgtgctcccgccgcctgcttctgcatcccagcaccagaccctgatgctgtggccagggcctcccggaaggttccagtagggcccaatgtcaacaccccaggaggtattctgggcacagcccagcgcctgcagagcctgggaacggagaaggagacagcccagaaggagtgcgaggcgtttctgtccacgcggcccgtgggccccgctgccctgcagctgcccgtagccctcaacagcgtgaagaacaagttcagtgacgtgcaggttctgtgcagcctctacggggagaaagccaaggctgccctgggtctggagcggcagatccaggatgcggacagggtcatccgaggcttcgaggccaccctggtgcaggaggcccccatccctgctgaaccgggggctctgcaggagagggtcagcgagctgcagcgccagcggagggagctgctggaacagcagacctgcgtgctgcggctacaccgcgcgctgaaggcctcggagcacgcatgcgctgcgctgcagaacaacttccaggagttctgccaagacctgcctcgccagcagcgccaggtgcgagccctcaccgaccgctaccacgccgtaggggaccagctggacctgcgggagaaggtggtgcaggatgccgccctcacctaccagcagttcaagaactgcaaggataacctgagctcctggctggagcacctgccccgcagccatgtgcggcccagcgacggccccagccagatcgcctacaagttgcaggcgcagaagacggggccagcccatctctgtctggcccgactggggcagtgggatttacaagctcaggccacagagccctga

SEQ ID NO: 102 - protein, 561 aa, Pan troglodytes
MFKGLSKGSQGKGSPKGSPAKGVPQRLPQQAQPDRLNSEQSQALQHQQETGRSLKEAEVLLKDLFLDVDKARRLKHPQAEEIEKDIKQLHERVTQECAEYRALYEKMVLPPDVGPRVDWARVLEQKQAHQEALKMEWQNFLNLCICQETQLQHVEDYRRFQEEADSVSQTLAKLNSNLDAKYSPAPGGPPGAPTELLQQLEAEEKRLAITERATGDLQRRSQDVPPLPQRRNPPQQPLHVDSICDWDSGEVQLLRGERYKLVDNTDPHTWVVQGPGGETKRAPAACFCIPAPDPDAVARASRKVPVGPNVNTPGGILGTAQRLQSLGTEKETAQKECEAFLSTRPVGPAALQLPVALNSVKNKFSDVQVLCSLYGEKAKAALGLERQIQDADRVIRGFEATLVQEAPIPAEPGALQERVSELQRQRRELLEQQTCVLRLHRALKASEHACAALQNNFQEFCQDLPRQQRQVRALTDRYHAVGDQLDLREKVVQDAALTYQQFKNCKDNLSSWLEHLPRSHVRPSDGPSQIAYKLQAQKTGPAHLCLARLGQWDLQAQATEP

SEQ ID NO: 103 - DNA, 6921 bp, Homo sapiens
  CDS (158)..(6286)
gaattctgactgtccactcaaaacttctattccgatcaaagctatctgtgactacagacaaattgagataaccatttacaaagacgatgaatgtgttttggcgaataactctcatcgtgctaaatggaaggtcattagtcctactgggaatgaggctatggtcccatctgtgtgcttcaccgttcctccaccaaacaaagaagcggtggaccttgccaacagaattgagcaacagtatcagaatgtcctgactctttggcatgagtctcacataaacatgaagagtgtagtatcctggcattatctcatcaatgaaattgatagaattcgagctagcaatgtggcttcaataaagacaatgctacctggtgaacatcagcaagttctaagtaatctacaatctcgttttgaagattttctggaagatagccaggaatcccaagtcttttcaggctcagatataacacaactggaaaaggaggttaatgtatgtaagcagtattatcaagaacttcttaaatctgcagaaagagaggagcaagaggaatcagtttataatctctacatctctgaagttcgaaacattagacttcggttagagaactgtgaagatcggctgattagacagattcgaactcccctggaaagagatgatttgcatgaaagtgtgttcagaatcacagaacaggagaaactaaagaaagagctggaacgacttaaagatgatttgggaacaatcacaaataagtgtgaggagtttttcagtcaagcagcagcctcttcatcagtccctaccctacgatcagagcttaatgtggtccttcagaacatgaaccaagtctattctatgtcttccacttacatagataagttgaaaactgttaacttggtgttaaaaaacactcaagctgcagaagccctcgtaaaactctatgaaactaaactgtgtgaagaagaagcagttatagctgacaagaataatattgagaatctaataagtactttaaagcaatggagatctgaagtagatgaaaagagacaggtattccatgccttagaggatgagttgcagaaagctaaagccatcagtgatgaaatgtttaaaacgtataaagaacgggaccttgattttgactggcacaaagaaaaagcagatcaattagttgaaaggtggcaaaatgttcatgtgcagattgacaacaggttacgggacttagagggcattggcaaatcactgaagtactacagagacacttaccatcctttagatgattggatccagcaggttgaaactactcagagaaagattcaggaaaatcagcctgaaaatagtaaaaccctagccacacagttgaatcaacagaagatgctggtgtccgaaatagaaatgaaacagagcaaaatggacgagtgtcaaaaatatgcagaacagtactcagctacagtgaaggactatgaattacaaacaatgacctaccgggccatggtagattcacaacaaaaatctccagtgaaacgccgaagaatgcagagttcagcagatctcattattcaagagttcatggacctaaggactcgatatactgccctggtcactctcatgacacaatatattaaatttgctggtgattcattgaagaggctggaagaggaggagattaaaaggtgtaaggagacttctgaacatggggcatattcagatctgcttcagcgtcagaaggcaacagtgcttgagaatagcaaacttacaggaaagataagtgagttggaaagaatggtagctgaactaaagaaacaaaagtcccgagtagaggaagaacttccgaaggtcagggaggctgcagaaaatgaattgagaaagcagcagagaaatgtagaagatatctctctgcagaagataagggctgaaagtgaagccaagcagtaccgcagggaacttgaaaccattgtgagagagaaggaagccgctgaaagagaactggagcgggtgaggcagctcaccatagaggccgaggctaaaagagctgccgtggaagagaacctcctgaattttcgcaatcagttggaggaaaacacctttaccagacgaacactggaagatcatcttaaaagaaaagatttaagtctcaatgatttggagcaacaaaaaaataaattaatggaagaattaagaagaaagagagacaatgaggaagaactcttgaagctgataaagcagatggaaaaagaccttgcatttcagaaacaggtagcagagaaacagttgaaagaaaagcagaaaattgaattggaagcaagaagaaaaataactgaaattcagtatacatgtagagaaaatgcattgccagtgtgtccgatcacacaggctacatcatgcagggcagtaacgggtctccagcaagaacatgacaagcagaaagcagaagaactcaaacagcaggtagatgaactaacagctgccaatagaaaggctgaacaagacatgagagagctgacatatgaacttaatgccctccagcttgaaaaaacgtcatctgaggaaaaggctcgtttgctaaaagataaactagatgaaacaaataatacactcagatgccttaagttggagctggaaaggaaggatcaggcggagaaagggtattctcaacaactcagagagcttggtaggcaattgaatcaaaccacaggtaaagctgaagaagccatgcaagaagctagtgatctcaagaaaataaagcgcaattatcagttagaattagaatctcttaatcatgaaaaagggaaactacaaagagaagtagacagaatcacaagggcacatgctgtagctgagaagaatattcagcatttaaattcacaaattcattcttttcgagatgagaaagaattagaaagactacaaatctgccagagaaaatcagatcatctaaaagaacaatttgagaaaagccatgagcagttgcttcaaaatatcaaagctgaaaaagaaaataatgataaaatccaaaggctcaatgaagaattggagaaaagtaatgagtgtgcagagatgctaaaacaaaaagtagaggagcttactaggcagaataatgaaaccaaattaatgatgcagagaattcaggcagaatcagagaatatagttttagagaaacaaactatccagcaaagatgtgaagcactgaaaattcaggcagatggttttaaagatcagctacgcagcacaaatgaacacttgcataaacagacaaaaacagagcaggattttcaaagaaaaattaaatgcctagaagaagacctggcgaaaagtcaaaatttggtaagtgaatttaagcaaaagtgtgaccaacagaacattatcatccagaataccaagaaagaagttagaaatctgaatgcggaactgaatgcttccaaagaagagaagcgacgcggggagcagaaagttcagctacaacaagctcaggtgcaagagttaaataacaggttgaaaaaagtacaagacgaattacacttaaagaccatagaggagcagatgacccacagaaagatggttctgtttcaggaagaatctggtaaattcaaacaatcagcagaggagtttcggaagaagatggaaaaattaatggagtccaaagtcatcactgaaaatgatatttcaggcattaggcttgactttgtgtctcttcaacaagaaaactctagagcccaagaaaatgctaagctttgtgaaacaaacattaaagaacttgaaagacagcttcaacagtatcgtgaacaaatgcagcaagggcagcacatggaagcaaatcattaccaaaaatgtcagaaacttgaggatgagctgatagcccagaagcgtgaggttgaaaacctgaagcaaaaaatggaccaacagatcaaagagcatgaacatcaattagttttgctccagtgtgaaattcaaaaaaagagcacagccaaagactgtaccttcaaaccagattttgagatgacagtgaaggagtgccagcactctggagagctgtcctctagaaacactggacaccttcacccaacacccagatcccctctgttgagatggactcaagaaccacagccattggaagagaagtggcagcatcgggttgttgaacagatacccaaagaagtccaattccagccaccaggggctccactcgagaaagagaaaagccagcagtgttactctgagtacttttctcagacaagcaccgagttacagataacttttgatgagacaaaccccattacaagactgtctgaaattgagaagataagagaccaagccctgaacaattctagaccacctgttaggtatcaagataacgcatgtgaaatggaactggtgaaggttttgacacccttagagatagctaagaacaagcagtatgatatgcatacagaagtcacaacattaaaacaagaaaagaacccagttcccagtgctgaagaatggatgcttgaagggtgcagagcatctggtggactcaagaaaggggatttccttaagaagggcttagaaccagagaccttccagaactttgatggtgatcatgcatgttcagtcagggatgatgaatttaaattccaagggcttaggcacactgtgactgccaggcagttggtggaagctaagcttctggacatgagaacaattgagcagctgcgactcggtcttaagactgttgaagaagttcagaaaactcttaacaagtttctgacgaaagccacctcaattgcagggctttacctagaatctacaaaagaaaagatttcatttgcctcagcggccgagagaatcataatagacaaaatggtggctttggcatttttagaagctcaggctgcaacaggttttataattgatcccatttcaggtcagacatattctgttgaagatgcagttcttaaaggagttgttgaccccgaattcagaattaggcttcttgaggcagagaaggcagctgtgggatattcttattcttctaagacattgtcagtgtttcaagctatggaaaatagaatgcttgacagacaaaaaggtaaacatatcttggaagcccagattgccagtgggggtgtcattgaccctgtgagaggcattcgtgttcctccagaaattgctctgcagcaggggttgttgaataatgccatcttacagtttttacatgagccatccagcaacacaagagttttccctaatcccaataacaagcaagctctgtattactcagaattactgcgaatgtgtgtatttgatgtagagtcccaatgctttctgtttccatttggggagaggaacatttccaatctcaatgtcaagaaaacacatagaatttctgtagtagatactaaaacaggatcagaattgaccgtgtatgaggctttccagagaaacctgattgagaaaagtatatatcttgaactttcagggcagcaatatcagtggaaggaagctatgttttttgaatcctatgggcattcttctcatatgctgactgatactaaaacaggattacacttcaatattaatgaggctatagagcagggaacaattgacaaagccttggtcaaaaagtatcaggaaggcctcatcacacttacagaacttgctgattctttgctgagccggttagtccccaagaaagatttgcacagtcctgttgcagggtattggctgactgctagtggggaaaggatctctgtactaaaagcctcccgtagaaatttggttgatcggattactgccctccgatgccttgaagcccaagtcagtacagggggcataattgatcctcttactggcaaaaagtaccgggtggccgaagctttgcatagaggcctggttgatgaggggtttgcccagcagctgcgacagtgtgaattagtaatcacagggattggccatcccatcactaacaaaatgatgtcagtggtggaagctgtgaatgcaaatattataaataaggaaatgggaatccgatgtttggaatttcagtacttgacaggagggttgatagagccacaggttcactctcggttatcaatagaagaggctctccaagtaggtattatagatgtcctcattgccacaaaactcaaagatcaaaagtcatatgtcagaaatataatatgccctcagacaaaaagaaagttgacatataaagaagccttagaaaaagctgattttgatttccacacaggacttaaactgttagaagtatctgagcccctgatgacaggaatttctagcctctactattcttcctaatgggacatgtttaaataactgtgcaaggggtgatgcaggctggttcatgccactttttcagagtatgatgatatcggctacatatgcagtctgtgaattatgtaacatactctatttcttgagggctgcaaattgctaagtgctcaaaatagagtaagttttaaattgaaaattacataagatttaatgcccttcaaatggtttcatttagccttgagaatggttttttgaaacttggccacactaaaatgtttttttttttttacgtagaatgtgggataaacttgatgaactccaagttcacagtgtcatttcttcagaactccccttcattgaatagtgatcatttattaaatgataaattgcactcgctgaaagagcacgtcatgaagcaccatggaatcaaagagaaagatataaattcgttcccacagccttcaagctgcagtgttttagattgcttcaaaaaatgaaaaagttttgcctttttcgatatagtgaccttctttgcatattaaaatgtttaccacaatgtcccatttctagttaagtcttcgcacttgaaagctaacattatgaatattatgtgttggaggaggggaaggattttcttcattctgtgtattttccgg

SEQ ID NO: 104 - protein, 2043 aa, Homo sapiens
MVPSVCFTVPPPNKEAVDLANRIEQQYQNVLTLWHESHINMKSVVSWHYLINEIDRIRASNVASIKTMLPGEHQQVLSNLQSRFEDFLEDSQESQVFSGSDITQLEKEVNVCKQYYQELLKSAEREEQEESVYNLYISEVRNIRLRLENCEDRLIRQIRTPLERDDLHESVFRITEQEKLKKELERLKDDLGTITNKCEEFFSQAAASSSVPTLRSELNVVLQNMNQVYSMSSTYIDKLKTVNLVLKNTQAAEALVKLYETKLCEEEAVIADKNNIENLISTLKQWRSEVDEKRQVFHALEDELQKAKAISDEMFKTYKERDLDFDWHKEKADQLVERWQNVHVQIDNRLRDLEGIGKSLKYYRDTYHPLDDWIQQVETTQRKIQENQPENSKTLATQLNQQKMLVSEIEMKQSKMDECQKYAEQYSATVKDYELQTMTYRAMVDSQQKSPVKRRRMQSSADLIIQEFMDLRTRYTALVTLMTQYIKFAGDSLKRLEEEEIKRCKETSEHGAYSDLLQRQKATVLENSKLTGKISELERMVAELKKQKSRVEEELPKVREAAENELRKQQRNVEDISLQKIRAESEAKQYRRELETIVREKEAAERELERVRQLTIEAEAKRAAVEENLLNFRNQLEENTFTRRTLEDHLKRKDLSLNDLEQQKNKLMEELRRKRDNEEELLKLIKQMEKDLAFQKQVAEKQLKEKQKIELEARRKITEIQYTCRENALPVCPITQATSCRAVTGLQQEHDKQKAEELKQQVDELTAANRKAEQDMRELTYELNALQLEKTSSEEKARLLKDKLDETNNTLRCLKLELERKDQAEKGYSQQLRELGRQLNQTTGKAEEAMQEASDLKKIKRNYQLELESLNHEKGKLQREVDRITRAHAVAEKNIQHLNSQIHSFRDEKELERLQICQRKSDHLKEQFEKSHEQLLQNIKAEKENNDKIQRLNEELEKSNECAEMLKQKVEELTRQNNETKLMMQRIQAESENIVLEKQTIQQRCEALKIQADGFKDQLRSTNEHLHKQTKTEQDFQRKIKCLEEDLAKSQNLVSEFKQKCDQQNIIIQNTKKEVRNLNAELNASKEEKRRGEQKVQLQQAQVQELNNRLKKVQDELHLKTIEEQMTHRKMVLFQEESGKFKQSAEEFRKKMEKLMESKVITENDISGIRLDFVSLQQENSRAQENAKLCETNIKELERQLQQYREQMQQGQHMEANHYQKCQKLEDELIAQKREVENLKQKMDQQIKEHEHQLVLLQCEIQKKSTAKDCTFKPDFEMTVKECQHSGELSSRNTGHLHPTPRSPLLRWTQEPQPLEEKWQHRVVEQIPKEVQFQPPGAPLEKEKSQQCYSEYFSQTSTELQITFDETNPITRLSEIEKIRDQALNNSRPPVRYQDNACEMELVKVLTPLEIAKNKQYDMHTEVTTLKQEKNPVPSAEEWMLEGCRASGGLKKGDFLKKGLEPETFQNFDGDHACSVRDDEFKFQGLRHTVTARQLVEAKLLDMRTIEQLRLGLKTVEEVQKTLNKFLTKATSIAGLYLESTKEKISFASAAERIIIDKMVALAFLEAQAATGFIIDPISGQTYSVEDAVLKGVVDPEFRIRLLEAEKAAVGYSYSSKTLSVFQAMENRMLDRQKGKHILEAQIASGGVIDPVRGIRVPPEIALQQGLLNNAILQFLHEPSSNTRVFPNPNNKQALYYSELLRMCVFDVESQCFLFPFGERNISNLNVKKTHRISVVDTKTGSELTVYEAFQRNLIEKSIYLELSGQQYQWKEAMFFESYGHSSHMLTDTKTGLHFNINEAIEQGTIDKALVKKYQEGLITLTELADSLLSRLVPKKDLHSPVAGYWLTASGERISVLKASRRNLVDRITALRCLEAQVSTGGIIDPLTGKKYRVAEALHRGLVDEGFAQQLRQCELVITGIGHPITNKMMSVVEAVNANIINKEMGIRCLEFQYLTGGLIEPQVHSRLSIEEALQVGIIDVLIATKLKDQKSYVRNIICPQTKRKLTYKEALEKADFDFHTGLKLLEVSEPLMTGISSLYYSS

SEQ ID NO: 105 - DNA, 7833 bp, Mus musculus
  CDS (1)..(7833)
atgagaatctcctgtccgttcattgtggtcccactgatcaactcctgcattagcttcagtaatgagtccttggatggacacaggttggatatgctgcagcagattgccacccgagttcagagggatagtgtcagctgcgaagacaaactcatcctcgcccgaaatgctctccagtctgattccaaaagattagagtcgggagtccagtttcagaatgaagcagagattgccgggtacatacttgaatgtgagaaccttttacgccagcatgtgattgatgtacagattctgatagatgggaaatactaccaggccgatcagctggtgcagagggttgcaaagctgcgtgatgagattatggccttaaggaacgaatgttcttcggtgtacagcaaaggacgcatgctgaccacggaacagaccaagctcatgatatcaggaatcactcaaagcttaaactcaggatttgcacaaaccttacaccccagcctgaactcagggctaacccagagtttaaccccttccttgacgtcttctagcgtgacttctggcttgtcgtccgggatgacttcccgcctgacgccatcagttactccggtgtatgcacctgggttcccttcagttgtagctccaaacttcagtttaggggtagagccaaattcattacagactctgaagctaatgcagatccgaaagccccttctcaagtcgtctttgctggatcagaacttgacagaagaggaagtcaatatgaaatttgttcaagatctcttgaactgggttgatgagatgcaggtgcagctggaccgcactgaatggggctcagatttgccaagtgttgaaagccatttagaaaaccataaaaatgttcaccgagccattgaagaatttgaatccagccttaaggaagctaaaattagtgagattcagatgacagcgcctctgaaactctcttacacagataagttgcacagattagagagtcagtacgctaaactcttgaatacatccagaaatcaggagcgacatctcgatacactccacaactttgtaacccgcgcaactaacgagcttatctggttgaatgaaaaggaggagtcggaagttgcttatgattggagtgagagaaacagcagtgtcgcccggaagaaaagctaccacgtggagctgatgcgggagctggagcagaaggaggagagcattaaagctgttcaggagatcgcagagcagctgcttctggaaaaccacccagcccgcttgaccatcgaggcgtacagagcggccatgcagacacagtggagctggatcctacagctgtgccagtgcgtggagcagcacattcaggagaactctgcctatttcgagtttttcaatgatgccaaagaagccactgattacctaaggaatctgaaagatgccatccagcgcaagtacagctgtgacaggtccagcagcattcacaaactggaagaccttgtccaggagtccatggaaaaggaggagctcctgcagtaccggagtgtggtggcagggctgatggggcgagcgaagacagtggtgcagctgaagccgaggaatcctgacaacccactcaagacgtccatccccatcaaagccatctgcgactacagacagattgagataaccatttacaaagacgatgagtgtgtcttggcaaacaactctcatcgagctaaatggaaggtcatcagtcctactgggaacgaggccgtggtcccgtctgtgtgctttactgttcccccaccaaacaaagaagcagttgactttgccaacagaattgagcaacagtatcagagtgtactcactctctggcatgagtctcacataaacatgaagagtgtcgtctcctggcactatctagtcaatgaaatcgacagaattcgagctagtaatgtggcttcgataaagacgatgttgcctggcgagcaccagcaggttctcagtaatctccagtcccgcttggaggatttcctggaggatagccaggaatcccagatattctcaggctcggatataagtcaactagaaaaggaagtgagtgtgtgcaggaagtattatcaagagctcctcaagtctgcagaaagagaggagcaagaggaatctgtgtataatctttacatctcggaagtgcgaaacattcggctccgcctggagagctgtgaagacaggttgattcggcagatccggactcccctggaaagagatgatttacatgaaagcatgctcaggatcacggagcaggagaaactgaagaaagagctggatcggcttaaagatgacttgggaacgatcacaaataagtgtgaagagtttttcagccaagcggctgactcgccgtctgtccccgctctccgatcagagctcagcgtggtcattcagagcttgagtcagatctactctatgtcttccacgtacatagagaaattgaagactgtgaatttggttttaaaaaacactcaagccgcagaagcccttgtcaaactctacgaaaccaaactgtgtgaagaggaagcagttatagcagacaagaataacattgagaatttaatgagtactttaaagcaatggcgatcagaagtagatgagaagagagaggtgttccatgcattggaagacgagttgcagaaagcaaaagccatcagcgatgagatgttcaagacacacaaagaacgggaccttgactttgactggcacaaagaaaaggcagaccagcttgtcgaaaggtggcagagcgttcacgtccagatcgacaacaggctccgggacttagaaggaatcgggaagtccctgaagcactacagggactcctaccaccctctcgatgactggatccagcacattgaaacgacccagagaaaaattcaggaaaatcagccagaaaacagcaaagccctggccctgcagctgaaccaacagaagatgctggtgtctgaaatagaggtgaagcagagcaaaatggacgagtgtcagaaatactcagagcagtactcggctgccgtcaaggactatgagttgcaaacaatgacctacagggctatggtggagtcccagcagaagtcgccagtgaagcgacggcggatacagagctcagcagacctcgttattcaagagttcatggacctacggacacggtacactgccctggtcactcttatgacgcagtatattaaatttgctggtgattcgttgaaaaggctggaagaggaggagatgaaaaggtctaaagagaattctgagcacggggcgtattcagatctactgcagcgtcagagagcaaccatggttgagaatagcaaacttaccgggaagatcagtgaactggaaacaatggtggctgagctaaagaaacagaaatcccgggtcgaggaggagcttccgaaagttaaggaggccgccgaaaatgaactgaggaagcaacagaggaacgtggaagacatcgccctgcagaagctgagggccgagagcgaggccaagcagtaccgccgtgagctggagacgatcgtgagggagaaggaagctgccgagcgggagctggagcgggtgaggcagctcacggcggaggcggaagctcggcgagccgcggtggaggagaacctccgcaacttccggagccagctgcaggaaaacaccttcaccaggcagacgctggaagatcatctgcggaggaaagactcgagcctcagtgatctggaacagcagaaacgggccctggtggaagaactgcaacgaaagcgggaccacgaggaggagctcctgcgactggtgaagcagatggagcgggacctggccttccagaagcaggtggccgagaagcagctgaaggaaaagcagaaggtcgagttggaagccagaaggaaaatcaccgaaattcagttttcatgtagagagagcgctgcggtggcacaggcacggccccagagggagcagggcagacagaaagaggaggagctgaagcagcaggtggatgagctgaccttggccaataggaaggcagagaaagagatgagggagctgaagtatgaactcagcgcggtccagctcgaaaaggcctcgtctgaggaaaaggcccggctgttgaaggataaattggacgagacgaataacacactcaagtgcctcaaggaagatctggaaaggaaggatcaggcccaggaacgctattcccagcagctcagagaccttggcgggcagctgaaccaaacaacagacaaagctgaagaggtcaggcaggaagcaaacgatctcaagaaaataaagcacacctatcagttggaattagagtctctccatcaagagaaaggaaaactccagagggaagttgacagagtcaccagggcgcacgcactagccgagaggaacattcagtgtttaaactcccaagttcacgcttcgagggatgagaaggacctctcagaagagaggagacggctctgccagagaaaatcagaccatttaaaagaagagtttgagaggagccatgcacagttgcttcagaatattcaagccgagaaagaaaataatgataaaatccaaaagctgaataaagagctggagaaaagcaatgagtgcgcagaaacgctcaagcagaaggtggatgaactcactaggcagaataatgaaaccaaattgatgatgcagaggattcaggcagagtccaagaacatagtccgcgagaagcaagccatccagcagagatgcgaagtgctgcggatccaggcagacggttttaaggatcagttacggaacaccaacgaacacttgcataagcagacaaaaacagagcaggatttccacagaaaaattaaaagcctcgaagatgatctagcccaaagtcaaaacctagtaagcgagttcaagcaaaagtgtgaccagcagagcatgatcatccagaaaacggagaaggaggtgaggagcctgagcgcagaactgagcgcgtccaaagaggagaagcggcgggaagagcagaaggctcagctgcagcgagctcaggtgcaggagctgaatgacaggctgaagagggtgcaagacgagctgcacctgaagaccatcgaagagcagatgacccacaggaagatgatcctgctccaggaagagtcggataagttcaaacgctcggcagatgagtttcggaagaagatggagaagctaatggagtccaaggtcgtcactgaaaccgatctctcaggcatcaagcacgactttgtgtctctccagagagaaaacttccgggcgcaagagaacgcgaagctgtgggagaccaacattcgagagcttgagcggcagcttcagtgctaccgtgagaagatgcagcaaggcccgcccgtggaagcaaaccactatcagaagtgccggagactcgaggaggagctgttggcccagagacgggaagttgaaaacctcaaacaaaaaatggaccagcagataaaggaacatgagcaccagttgcttcggctccagtgtgaaatccaaaagaagagcacaacccaagaccacaccttcgcgtcggcttttgatacggcagggagagagtgccaccaccctgcagagatctcccctgggaactctgggcaccttaacctaaagaccagactcccactgtccaggtggactcaggagccacaccagacagaaggaaaatggccgcacagggctgctgaacaacttccgaaggaggttcagttccgacagccaggggctccgctggacagggagagcagccagccatgctactcggagtatttttctcagacaagcactgaactgcagataacttttgatgataaaaacccaatcacgcgactgtctgaactagagacgatgagggagcaagccctgcatccctccagaccgccggtgacgtatcaggatgacaaacttgaaagggagttggtgaagcttttgacacccttagagatagctaagaacaaacagtgtggcatgcatacagaagtcacgaccttaaaacaagagaagaggctgggttccagtgctggtggatggatgctggaagggtgcagaacatctggtggactcaagggagatttccttaagaaaagcgtagagccagaggcttccccgagccttgaccttaaccaggcgtgctctgttagggatgaggagtttcagtttcaagggctcaggcacaccgtgactggcaggcagctggtcgaagccaagctcctggacatgaggacagttgagcagctgcggcttggtctgaagactgtcgaagaagttcagagaagtcttagcaagtttctgaccaaagctacctccattgcaggactttatctagaatcttccaaagaaaaaatgtcgttcacttcggcggcccagaaaatcataatagacaaaatgatagctctagcctttttagaagctcaggctgcaacaggttttataattgatccggtttctggtcagacttactgtgttgaagatgcagttcttcatggcatcgttgatcctgagttcaggagcaggctcctggaggcagagaaggcagttttgggatattcacatgcttctaagacgctgtcagtgttccaggcaatggaaaatagaatgcttgataggaagaaaggtaaacatatcttggaggcacaaattgccagtgggggcgtcattgaccctgtgagaggcgtccgtgtccctccagaaatggctgtgcagcagggcttgctgaacaacgccgtcctacagttcctgcatgaaccgtccagcaacacgagagtctttcctaatcccaacaacaagcaggctctgtattattcggagttactgcagatctgtgtgtttgatgtagattgccagtgttttctcttgccgtttggggagagggaaatatccaatctcaacatagagaaaactcataaaattgccgtggtagataccaaaactggggcggaactgacggcattcgaggctttccagagaaacctgattgacaagggtatttatctcgaactctcagggcagcagtatcagtggaaggaagctacattttttgactcctacgggcatccttctcacatgctgactgatactaaaactggtctgcagttcaatattagtgaagctgtcgagcagggaacgctagacaaagccttggtgcaaaagtatcaggaaggcctaactacactaacagaactggctgactttcttctgagcaaggtagttcccaagaaggatttgcacagtcccattgcaggctattggctgaccgctagtggggagcgaatctccttgctgaaagcctcccgtagaaacttggttgatagggttacagccctcagatgccttgaagcccaaatctgtacaggagggatcatcgatcccctaactgggaaaaagtacagggtggccgaggctttgcatagagggctggtggacgagggcttcgcccagcagctacgccagtgtgaattagtgatcacggggatcagccaccccgtcagcaataaaatgatgtcagtggtggaagccgtgaatgcaaatatcatcagtaaagaaatgggcatgcggtgcctggaatttcagtacctgacagggggcctgatagagccgaaggttttctcgaggctgaccatagaagaggcccttcacgtcggtatcattgatgtcctcatcgccaccagactcaaagatcaaaagtcatatgtcagggatataatgtgcccccagactaagagaaaattgacatataaagaggccctggagaaagctgattttgatttccacacaggacttaagctgttagaagtgtctgaacccttggggacagggatatccaacctctactattcttcccag

SEQ ID NO: 106 - protein, 2611 aa, Mus musculus
MRISCPFIVVPLINSCISFSNESLDGHRLDMLQQIATRVQRDSVSCEDKLILARNALQSDSKRLESGVQFQNEAEIAGYILECENLLRQHVIDVQILIDGKYYQADQLVQRVAKLRDEIMALRNECSSVYSKGRMLTTEQTKLMISGITQSLNSGFAQTLHPSLNSGLTQSLTPSLTSSSVTSGLSSGMTSRLTPSVTPVYAPGFPSVVAPNFSLGVEPNSLQTLKLMQIRKPLLKSSLLDQNLTEEEVNMKFVQDLLNWVDEMQVQLDRTEWGSDLPSVESHLENHKNVHRAIEEFESSLKEAKISEIQMTAPLKLSYTDKLHRLESQYAKLLNTSRNQERHLDTLHNFVTRATNELIWLNEKEESEVAYDWSERNSSVARKKSYHVELMRELEQKEESIKAVQEIAEQLLLENHPARLTIEAYRAAMQTQWSWILQLCQCVEQHIQENSAYFEFFNDAKEATDYLRNLKDAIQRKYSCDRSSSIHKLEDLVQESMEKEELLQYRSVVAGLMGRAKTVVQLKPRNPDNPLKTSIPIKAICDYRQIEITIYKDDECVLANNSHRAKWKVISPTGNEAVVPSVCFTVPPPNKEAVDFANRIEQQYQSVLTLWHESHINMKSVVSWHYLVNEIDRIRASNVASIKTMLPGEHQQVLSNLQSRLEDFLEDSQESQIFSGSDISQLEKEVSVCRKYYQELLKSAEREEQEESVYNLYISEVRNIRLRLESCEDRLIRQIRTPLERDDLHESMLRITEQEKLKKELDRLKDDLGTITNKCEEFFSQAADSPSVPALRSELSVVIQSLSQIYSMSSTYIEKLKTVNLVLKNTQAAEALVKLYETKLCEEEAVIADKNNIENLMSTLKQWRSEVDEKREVFHALEDELQKAKAISDEMFKTHKERDLDFDWHKEKADQLVERWQSVHVQIDNRLRDLEGIGKSLKHYRDSYHPLDDWIQHIETTQRKIQENQPENSKALALQLNQQKMLVSEIEVKQSKMDECQKYSEQYSAAVKDYELQTMTYRAMVESQQKSPVKRRRIQSSADLVIQEFMDLRTRYTALVTLMTQYIKFAGDSLKRLEEEEMKRSKENSEHGAYSDLLQRQRATMVENSKLTGKISELETMVAELKKQKSRVEEELPKVKEAAENELRKQQRNVEDIALQKLRAESEAKQYRRELETIVREKEAAERELERVRQLTAEAEARRAAVEENLRNFRSQLQENTFTRQTLEDHLRRKDSSLSDLEQQKRALVEELQRKRDHEEELLRLVKQMERDLAFQKQVAEKQLKEKQKVELEARRKITEIQFSCRESAAVAQARPQREQGRQKEEELKQQVDELTLANRKAEKEMRELKYELSAVQLEKASSEEKARLLKDKLDETNNTLKCLKEDLERKDQAQERYSQQLRDLGGQLNQTTDKAEEVRQEANDLKKIKHTYQLELESLHQEKGKLQREVDRVTRAHALAERNIQCLNSQVHASRDEKDLSEERRRLCQRKSDHLKEEFERSHAQLLQNIQAEKENNDKIQKLNKELEKSNECAETLKQKVDELTRQNNETKLMMQRIQAESKNIVREKQAIQQRCEVLRIQADGFKDQLRNTNEHLHKQTKTEQDFHRKIKSLEDDLAQSQNLVSEFKQKCDQQSMIIQKTEKEVRSLSAELSASKEEKRREEQKAQLQRAQVQELNDRLKRVQDELHLKTIEEQMTHRKMILLQEESDKFKRSADEFRKKMEKLMESKVVTETDLSGIKHDFVSLQRENFRAQENAKLWETNIRELERQLQCYREKMQQGPPVEANHYQKCRRLEEELLAQRREVENLKQKMDQQIKEHEHQLLRLQCEIQKKSTTQDHTFASAFDTAGRECHHPAEISPGNSGHLNLKTRLPLSRWTQEPHQTEGKWPHRAAEQLPKEVQFRQPGAPLDRESSQPCYSEYFSQTSTELQITFDDKNPITRLSELETMREQALHPSRPPVTYQDDKLERELVKLLTPLEIAKNKQCGMHTEVTTLKQEKRLGSSAGGWMLEGCRTSGGLKGDFLKKSVEPEASPSLDLNQACSVRDEEFQFQGLRHTVTGRQLVEAKLLDMRTVEQLRLGLKTVEEVQRSLSKFLTKATSIAGLYLESSKEKMSFTSAAQKIIIDKMIALAFLEAQAATGFIIDPVSGQTYCVEDAVLHGIVDPEFRSRLLEAEKAVLGYSHASKTLSVFQAMENRMLDRKKGKHILEAQIASGGVIDPVRGVRVPPEMAVQQGLLNNAVLQFLHEPSSNTRVFPNPNNKQALYYSELLQICVFDVDCQCFLLPFGEREISNLNIEKTHKIAVVDTKTGAELTAFEAFQRNLIDKGIYLELSGQQYQWKEATFFDSYGHPSHMLTDTKTGLQFNISEAVEQGTLDKALVQKYQEGLTTLTELADFLLSKVVPKKDLHSPIAGYWLTASGERISLLKASRRNLVDRVTALRCLEAQICTGGIIDPLTGKKYRVAEALHRGLVDEGFAQQLRQCELVITGISHPVSNKMMSVVEAVNANIISKEMGMRCLEFQYLTGGLIEPKVFSRLTIEEALHVGIIDVLIATRLKDQKSYVRDIMCPQTKRKLTYKEALEKADFDFHTGLKLLEVSEPLGTGISNLYYSSQ

SEQ ID NO: 107 - DNA, 1914 bp, Mus musculus
  CDS (1)..(1914)
atgccaaggctcctgagaggtgtcttctgtgtcgttgagatattccacaagtacgccattgaggatggcgtcaaccaggcaacactgacccgcacagagctgagacagctccttgagggagaaattggggacttccttcagccacatgtctttcatgctgtggagagaaagttgaaccttctgaattttgacagagatggtaccatcagttttgaggaatttgttcttgcaatcttcagcttattgaatccctcttattttgacatatcattactaaattcagaaccaagactgatgtctaaatcagagaagatagatgctgtggatttgggggcaattggtggaaacattcagcaggtagtaggggttgggccaactcaagaaaggctcatatttccatcagaaatggcatcatcaggtcagcccagcaatgaagaaggtgaggtaggtgatgagcctatggtgagcccatgtgaagacattaagacccacagcctgccaagaaatgtgtctgagccaaatgaccctgagaaccaacagccaaaagaagatgctcaggaagtcgcacaaaatgtaccagcaactgaatatgatggagtccaatttaagagaaatacagtagtcgaagtacccaaacagagcaccagtccaacacaggagatcccaagagaaagaagtaaaccatccaggaggctaagtgacaccaagataagtgaccatatgattcagaggccaactgaagatgaggaacatacttctacaacacaagatccattcctgcaaaaaagagacaaagccaccgggtcagagaacactgatttgtcagtagtagctgctaccaggaaatcatctcaaacacaggaaatttttgagcctatggatgatactaaactatctgaggctcaagaaactggaaaggatgctggcagaataccacctgaaacaaatttagaggagccccaagctgatgctaaagtagctgagagccacggattgccagcacaagaaagagaacacaatacaagggaccagtctgttcaaagccggagcagaaatgtttcagaaacatctagtagaggagaacaggagggggagtggaaagaacatgaaagaataactctatccccaacagcagatgctgaaacacaggatgagaagtgtcaagaatttccaggatcatggagggaaaacgatgccaaaaaggactctgctgcaaaagatccaagttctgaagaaggaaatcagaatctccctgaaattaaggaagattctgtctcaggaaaagaagcaagacacagtgaggaagacacagtatatgcatttgaaatcaacaaaaacagccctgcagctgaagagacattggaaacaagagaaaggtcccaggagctggcaccacttgagaagcaatctcaaagaaaaaagcacagggccaccaggattcaggacaagccggtcaggaaggaggaccacaatgagggagaagattctgagttatcacttacacagagtgatgagggcttttgtgaaattcccaacagcctggctccagaggtaggtaagagcagctcagagatagctgaaccacatgtaccagaggattcacagagtcagatagaccaccatggagatgctaagcaagaaagtcacactaacaacccagatccccagaagcagggagcaccaggtgagagcagcagagagcaggaggcagtagtgctgtcaatccaagaagatgggcagctcccagagggacaggaacagtctgccagagatggtctgcatgatggtctgagctcaaggaccaaaggaggcccaggggcagctgtggagcccagtgagggagaggaggtacaggaggccacagcagggagagaaaacaggaaagccctagaggcagagagtttggaggcccag

SEQ ID NO: 108 - protein, 638 aa, Mus musculus
MPRLLRGVFCVVEIFHKYAIEDGVNQATLTRTELRQLLEGEIGDFLQPHVFHAVERKLNLLNFDRDGTISFEEFVLAIFSLLNPSYFDISLLNSEPRLMSKSEKIDAVDLGAIGGNIQQVVGVGPTQERLIFPSEMASSGQPSNEEGEVGDEPMVSPCEDIKTHSLPRNVSEPNDPENQQPKEDAQEVAQNVPATEYDGVQFKRNTVVEVPKQSTSPTQEIPRERSKPSRRLSDTKISDHMIQRPTEDEEHTSTTQDPFLQKRDKATGSENTDLSVVAATRKSSQTQEIFEPMDDTKLSEAQETGKDAGRIPPETNLEEPQADAKVAESHGLPAQEREHNTRDQSVQSRSRNVSETSSRGEQEGEWKEHERITLSPTADAETQDEKCQEFPGSWRENDAKKDSAAKDPSSEEGNQNLPEIKEDSVSGKEARHSEEDTVYAFEINKNSPAAEETLETRERSQELAPLEKQSQRKKHRATRIQDKPVRKEDHNEGEDSELSLTQSDEGFCEIPNSLAPEVGKSSSEIAEPHVPEDSQSQIDHHGDAKQESHTNNPDPQKQGAPGESSREQEAVVLSIQEDGQLPEGQEQSARDGLHDGLSSRTKGGPGAAVEPSEGEEVQEATAGRENRKALEAESLEAQ

SEQ ID NO: 109 - DNA, 2793 bp, Bos taurus
  CDS (1)..(2793)
atggagacagcacaggctcagagaaatttagttgagaagggcttcaactctgattcaggctttgcaatttacttgagactcaataaaaggtttgagcacctcctgtcagctcacagccgctgccccacattccacttgctctcactcgagaacaagtctcctgagtttgtaaagatgcctcagctcctgagagacatcctctgtgtaattgagacattccacaagtacgccagggaggatgcagcgacgctgacctgcacagagctgaaacagctcatccagagcgaatttgaggacatttttcagccatgtgccatccacgctgtggagagaaacttgaatcttctgaatatcgacagtaatggcgccatcagctttgatgaatttgttcttgcaatcttcagctttttgaatgtctgttaccttgacacacagtcattactaaactcagaaccaagacaagtatctaaaccagaggggatgccacatgatatgggtcttcaggtgacgaatgaaactgaccagtggacagaaggaacttcacaaactcaagacaaagtggtgcttccttcaggaacggcatcatcaactcatctcagcctcgaagagagagcagttgaacacaatagggtggacccacagggacataccacagctcacaaactaccagtagaaacgtctgaacacagtgactctaagaaccaacatctgaaaggagatgaacagagccagaaagtggaccaagatgtatcagcaacaggtgacagtagaacccaacgtgagacaagtaagccaatggcaggatcagaacagatcagcagtcacacaaagggggagggacagaataaggagattctccagaagggagatatactagccaggaaacaaagtggcactgagacaggaggacggtttggagaacaggaagggagcttgggaatcctgcattctccactggaagaaaccacacagaggcctggtggatcatctgaggatcaggaagttgcaggagagaagggtgttaagggacaccctaaatcacaagaaccatcagtacagggaaaagatgagcccagttcagaacatgtcgacctgccaaaacaagctgctgctcggaaaccatctcagacacagaaatcagctgctgccaaggatgagagtagaacagctgagactccagaaccacccatacaagaaaaagaatatgaaacaagggacttgtcagtccaaggtgagaacagaaatgtttcagaaacacccatggttagagttgaaaggaagggtgtaagaggtccagaggtccatcaaacagtagggcagaaacaaattgaggaaaaaactcagccaccagctctggaagagccaacagaagataagaagtatcatgaactccaggaatcatcaaaagaaaagaatgctggagaagattctgagacacatgagttaaactcagaaggaggagaacagaaagattccgaaagtgaaggagccatcagcccaggagaagaggcaagacatgctgaggaaggcacagcagaagcacttgtgaacagtaaaaatgcccctgaagcagaagggacaccaggaacaagagaaagaatatgggagttgacaacacttgagaaccaatctggagaaaaaaataagatgaccaccaaaattcatgacaagttggtcaaggaagatgacggctaccagggggaaggttctgagccagtggccacacagaatgatgagaggtctcctgaaacccccaacagcctgactgcagaggatggtgacagcaactcagagacaagtgatctgtttgtgcaaggggattcccaaagtcaaacaaacccattcagagggtctgtgcaaggaagtgacagtaataacccagaaactcagaaacacttagcactgagtgaggaaaagagagttcaggaggcagcagtgctggcagtcagaggagaggatgagcaggtcacagaggaacatgcacaggagcacgagggtcagggctcagcgacaacaggccgaggcccagctgtggagcccaggggacactccgacacgcaggtgttcatagtgagagatgaaaacacaaagtccctggagccagggatcccaggtgccccaaatgcaggcatcaccaaacagctttccgtaaggcaactccctacaaagaaagacagtagaaaagagctaaaggaccagagcccaagtaccaaaaaagaggaagatggagccctagaagcccaggaggatttagtaaaaagtctggatgagaacaatgcagtctcccaaaagacatgccctgcaacactggaggaggagactgaaagcccccaacagctggcaggagaacaaagtctctctacaaaagaacatgatccttcagtctctgagtcaggccttgaagagaggatgcagagagaccaagaactctgtttggtggagagaggtgcagaacactctagtcccctgtacgaggccctgcaggagaagatgctgcagcaaacaaacgtaacccaagggaagcatcaaaatcaagctcagacagccagtgtagcaagcccagagatccgcagaaaccagtcgagtgcatccctcaccaatgacagctcagatggtcttgtcttttttattgacagacaagcactacaaaagtacatcagggagtttctgcctgatgaggatcctactggtgcacagcaaatatcagctccccaggccttggaagataagcagggtcgccctcaaagagaggaactagaaccacaaaaggaagcaagcactccaaagcaatga

SEQ ID NO: 110 - protein, 930 aa, Bos taurus
METAQAQRNLVEKGFNSDSGFAIYLRLNKRFEHLLSAHSRCPTFHLLSLENKSPEFVKMPQLLRDILCVIETFHKYAREDAATLTCTELKQLIQSEFEDIFQPCAIHAVERNLNLLNIDSNGAISFDEFVLAIFSFLNVCYLDTQSLLNSEPRQVSKPEGMPHDMGLQVTNETDQWTEGTSQTQDKVVLPSGTASSTHLSLEERAVEHNRVDPQGHTTAHKLPVETSEHSDSKNQHLKGDEQSQKVDQDVSATGDSRTQRETSKPMAGSEQISSHTKGEGQNKEILQKGDILARKQSGTETGGRFGEQEGSLGILHSPLEETTQRPGGSSEDQEVAGEKGVKGHPKSQEPSVQGKDEPSSEHVDLPKQAAARKPSQTQKSAAAKDESRTAETPEPPIQEKEYETRDLSVQGENRNVSETPMVRVERKGVRGPEVHQTVGQKQIEEKTQPPALEEPTEDKKYHELQESSKEKNAGEDSETHELNSEGGEQKDSESEGAISPGEEARHAEEGTAEALVNSKNAPEAEGTPGTRERIWELTTLENQSGEKNKMTTKIHDKLVKEDDGYQGEGSEPVATQNDERSPETPNSLTAEDGDSNSETSDLFVQGDSQSQTNPFRGSVQGSDSNNPETQKHLALSEEKRVQEAAVLAVRGEDEQVTEEHAQEHEGQGSATTGRGPAVEPRGHSDTQVFIVRDENTKSLEPGIPGAPNAGITKQLSVRQLPTKKDSRKELKDQSPSTKKEEDGALEAQEDLVKSLDENNAVSQKTCPATLEEETESPQQLAGEQSLSTKEHDPSVSESGLEERMQRDQELCLVERGAEHSSPLYEALQEKMLQQTNVTQGKHQNQAQTASVASPEIRRNQSSASLTNDSSDGLVFFIDRQALQKYIREFLPDEDPTGAQQISAPQALEDKQGRPQREELEPQKEASTPKQ

SEQ ID NO: 111 - DNA, 2712 bp, Homo sapiens
  CDS (1)..(2712)
atgcctcagctcctgagaaatgtcctctgtgtaattgagacattccacaaatatgccagtgaggacagtaacggggcaacactgactggcagagagctgaaacaactcatccagggcgagtttggggacttttttcagccctgtgtccttcatgctgtggaaaaaaattcaaatcttctgaatattgacagtaatggcatcatcagttttgatgaatttgttcttgcaatcttcaacttgttgaacctctgttatcttgacataaaatcattactaagttctgaactaagacaggtgactaaaccagagaaggagaagctagatgatgtggatgttcaggcaaccaccggagatggtcagtggacagtgggaacttcaccaactcaagaaaagaggatgcttccttcaggaatggcatcatcatctcagctcatccctgaagaaagtggagcagttggaaataacagagtggacccatggagagaagccaagactcacaactttccaggagaagcatctgaacacaatgatcctaagaacaaacacctggaaggagatgaacaaagtcaggaagtggctcaagatatacaaacaacagaagacaatgaaggccaacttaagacaaataagccaatggcaggatcaaaaaagaccagcagtcccacagagaggaagggacaagataaggagatctcccaggaaggagatgaaccagccagagagcaaagtgtttccaagataagagaccagtttggagaacaggaaggaaacttggcaacccaaagttcaccaccaaaagaagcaacacaaagaccatgtgaagatcaggaagttagaacagaaaaggaaaaacactctaatatacaagaaccacccctacaaagagaagatgagcccagttcacagcatgctgacctgccagaacaagctgctgccaggtcaccatctcagacacagaaatcaactgattccaaggatgtctgtagaatgtttgacactcaagaaccaggaaaggatgctgaccagacaccagctaaaacaaagaatttgggtgaacctgaggattatggcagaacatctgagacccaagaaaaagaatgtgaaacaaaggacctgccagtccaatatggtagcagaaatggttcagaaacatctgacatgagagatgaaaggaaagagaggagaggtcctgaggcccatggaacagcagggcagaaagaacgtgacagaaaaactcggccactagtcctggaaacccaaacacaggatgggaagtatcaggaactccaaggattatcaaaatcaaaagatgctgaaaaaggttctgagacacaatatctaagctcagaaggaggagatcagactcaccctgaacttgaaggaacagcagtctcaggagaagaggcagaacacaccaaagaaggcacagcagaagcatttgtgaacagcaaaaacgcacctgcagcagaaaggacactgggggcaagagaaagaacacaagatttagcaccacttgagaagcagtctgtaggagaaaatactagggtcaccaagactcatgaccaaccagttgaggaggaggatggttaccagggggaggaccctgagtcaccattcacacagagtgatgaggggtcttctgaaactcccaacagcctggcttcagaggaaggcaatagcagctcagagacaggtgaactgcctgtgcaaggggactcccagagtcaaggggaccaacatggagagtctgtgcaaggaggtcacaataataacccagatacccagaggcagggaacacctggtgagaaaaacagagctctggaggcagtggtaccagcagtcagaggagaggatgtacagctcacagaggaccaggaacagcctgccagaggagaacacaagaatcaaggcccagggaccaaaggcccaggtgcagctgtggagcccaatggacacccagaagcacaggaatccacagcaggagatgaaaatagaaagtccctggaaatagagatcacaggtgccctggatgaagacttcactgaccagctttccctaatgcagctccctggaaagggagatagcagaaatgaattaaaggtccaaggcccaagtagcaaagaagagaaaggaagagcaacagaggcccagaatactctgttagaaagtctagatgaggacaattcagcctccctcaagatacaacttgaaacaaaggaacctgtaacatcagaggaggaagatgaaagtccccaagagctggcaggagaaggtggtgaccaaaaaagtccagccaagaaagagcacaattcttcagtcccctggtcaagtcttgaaaagcagatgcagagagaccaagagccctgttctgtggagaggggtgcagtctattccagtccactataccagtacctacaggagaagatactgcagcaaacaaatgtaacccaagaggagcatcaaaagcaagttcagatagcccaggcatcaggcccagagctttgcagtgtatccctcaccagtgagatctcagattgttctgtctttttcaactacagccaagcatcacaaccatataccaggggacttccacttgatgagagtcctgctggtgcacaggaaacaccagctccccaggccttggaagataagcaaggtcaccctcagagagagaggctggtactacaaagggaggcaagcaccacaaagcaa

SEQ ID NO: 112 - protein, 904 aa, Homo sapiens
MPQLLRNVLCVIETFHKYASEDSNGATLTGRELKQLIQGEFGDFFQPCVLHAVEKNSNLLNIDSNGIISFDEFVLAIFNLLNLCYLDIKSLLSSELRQVTKPEKEKLDDVDVQATTGDGQWTVGTSPTQEKRMLPSGMASSSQLIPEESGAVGNNRVDPWREAKTHNFPGEASEHNDPKNKHLEGDEQSQEVAQDIQTTEDNEGQLKTNKPMAGSKKTSSPTERKGQDKEISQEGDEPAREQSVSKIRDQFGEQEGNLATQSSPPKEATQRPCEDQEVRTEKEKHSNIQEPPLQREDEPSSQHADLPEQAAARSPSQTQKSTDSKDVCRMFDTQEPGKDADQTPAKTKNLGEPEDYGRTSETQEKECETKDLPVQYGSRNGSETSDMRDERKERRGPEAHGTAGQKERDRKTRPLVLETQTQDGKYQELQGLSKSKDAEKGSETQYLSSEGGDQTHPELEGTAVSGEEAEHTKEGTAEAFVNSKNAPAAERTLGARERTQDLAPLEKQSVGENTRVTKTHDQPVEEEDGYQGEDPESPFTQSDEGSSETPNSLASEEGNSSSETGELPVQGDSQSQGDQHGESVQGGHNNNPDTQRQGTPGEKNRALEAVVPAVRGEDVQLTEDQEQPARGEHKNQGPGTKGPGAAVEPNGHPEAQESTAGDENRKSLEIEITGALDEDFTDQLSLMQLPGKGDSRNELKVQGPSSKEEKGRATEAQNTLLESLDEDNSASLKIQLETKEPVTSEEEDESPQELAGEGGDQKSPAKKEHNSSVPWSSLEKQMQRDQEPCSVERGAVYSSPLYQYLQEKILQQTNVTQEEHQKQVQIAQASGPELCSVSLTSEISDCSVFFNYSQASQPYTRGLPLDESPAGAQETPAPQALEDKQGHPQRERLVLQREASTTKQ

SEQ ID NO: 113 - DNA, 3432 bp, Strongylocentrotus purpuratus
  CDS (1)..(3432)
atggatatagtgctggtgcaagatgagagccagggagatctcaggaaaacagcagggcttatgtctgaggacaaacgtcaacagaaacttggtgaactgaaggagcagcgtcgacagtggagggaaagtggacccaccaaggagactgaggatgaacagacagatattctccggaaaggagtagctgtcttgcttgaaagtcgtctcattgggatgaaagctatccagggtggagaggccactgacggggacgtagaggtcagtctcatcgctgaccttcaagagaaacaggacaaagaggctggctatctcatggatgatcttgagagcaagagtgcaatgaccttaaagcagttgaagcaggtgcagttcatcgcccgagccaacggatggaatgacaatgtggctgccaccgtcctggtgaccaagtctgatacagagatggtgactgaggaacaactcttgaaagctttggagagcaaatatgatgtgatgagagataaactactggcagaggctttgatcaagcagacaggcgaagcagagtgggccaagctcactgaacgtgagcgtcaggctcgtcttatgaaactcaaactccaggaacgtaagatgagacaggagaataagtttgatgaggccaactcccttctcagtcagggtatcaaggatcaagcagaactggctcggttgctaggggcaaccaagacggagcaggaggagaagttaaagcagcgtcttgagagaaagaagcagttgaaggaggaacgtgaggcccaaggattggaggccaatgatgaggtgttggatgagatcgttcaacatgagatgtctcgaaaagaaatcttggaagacagaaagaagagacataacattcttgaaggactaaacaaccactttgaggatgagaagaatgctctgctggctgcgttgaggagtcaggacgataccctgcagagtgagaaggagagacagctggccctggctaagctgaggagggaccaacgcaagctgcaggatgaagagaagtttgaggcagctgctgccctctttggattggcacagcagcatgagaagaccagagaggccaactacgagaaggacaaggagcgtcaaaagcagcttgctagggagaggctggcagctaggagagccaagatggctggtgatgagaaaggggagcaggccaagcatcttactaggtctgacatccaagaacagctcttgctggaggagaaggagaatgccaaagcagatgcagcgcatgccaccaagtcagatccggtatccctggtttctacggtgatggatgaggtagataagaagcagagcagtgagcgagatgtcctggtcactctcatagatggtgccatggctaactccaaggaacgcacaaggctggaggaactagctctcaaggacctgttagcccagctggaagccctgaaagaggagagacgtcagctgcgtgaggattctgatctggagtttggtgatgtagacgtgagtgggcttagtgaggaggagctatccagacatctcacacaggtctctgagtatcaggagcagcagcatcgactcctcaagagcgctataaacatcaagatagaaatgatgcggcgttccttgattgaggagaagcgtttatcactagaagagattgaggaggagcttgctgtcatgatgttatcagagcttcaacagaaacagagtgtagaggtcaatgctcttcatcatgttctagaaggcttcccgggggataatagcaaaccccagggccatccaggtggcctggataagcgacatagtatggcatcgatagcgtctggtgtgggacactcattcaaagaattattcttctcagaatccactgaagtcataaagaatgaagagttccttcaccagatgaaggtcacccagcgcagagctcggcgggagggatggctggacaatgtggcggtcactgtgtttgaccacactacggtcacccttgagatgaccacagagatcgaggagatgactagaaggatccaggctagagagggcgccctgctgaccatggacaaagagcttgaggagaagaaggcggaggttatgaagaatgagagtggcagaactgcagaggaactagatgcaatgattgccaagctagagaaggagtatgcagatagaaagaaggctcttgaggaggagcagaccagggagaggaggcaggaggcagagatgaaagatgtcaaccaggagctggagcagaaggagcaagatcttcagaacctggagcaggagatgcaggaagccattgagaacgagcgtaaacgtcgtccaaatgaggagtttgatgccgaggctatgatggcggaaattgaggctcagtttgctgctaagaaaagggcaatgcaagttcagcttgagaagcagcgtcgtcaggcgatggagaagatagccgccaggaagcagagaatggaagatagaaactatgaagatgagatggctgtggctctgattcatgctgcagagaagagtaaaactcagaaggaagaggcagcggtggagcagaagaacaaacagaatcagctgcctgtcatcactgacccctcaccccggaagcctaagaaaaagggcaagaaaggggtgagttttggggaaccacccaaagctgacaaagtggctggtcctggtctgatgcgagagaagacggtgctggatgtggacatgtccgaggatgagaagcaaaacctgtctaagatgctcctctctcaccatagcaaagcacaatggaagatggagaaggagcgagagaagagggcaaatgagcttaaagaacgactggaaatgcgcaagactcgtatccaggatgctgcaaccaccatcttgggactgggagagagacagaaaactatggtggagaataaaaagaaggatgaaagggagcgtcagatagcgctggtgaaggagcgtgtgcagcgtgtacggtatgaacgcacccagaccatgaagttcaaaggtgacgacaagaaacggttcaaggactacctagagaaggaggattctggtctgtcagaggatgagaagatgacgaagatagctgaccggattaatagccagttcaagaggcatgagtccagctatagggcaggacacaagagtgcctttgaacctgatgaggatgaacttgcatcaaactcctccggttccaagcccgccacaccccagggctccgcccgacccaaaacagggcgtctcctgggccagaaggaaagagagcaattgatcaagtctcgccaggccaagaggagagagatcaagaaggtcaacaacagtatctcagccgcacccgacatggactccctcgccaagatgattgaggaccgcaagaaagccggtatgcagcaggaggaggaggaggaggaggataatggaagtgaggtttaa

SEQ ID NO: 114 - protein, 1143 aa, Strongylocentrotus purpuratus
MDIVLVQDESQGDLRKTAGLMSEDKRQQKLGELKEQRRQWRESGPTKETEDEQTDILRKGVAVLLESRLIGMKAIQGGEATDGDVEVSLIADLQEKQDKEAGYLMDDLESKSAMTLKQLKQVQFIARANGWNDNVAATVLVTKSDTEMVTEEQLLKALESKYDVMRDKLLAEALIKQTGEAEWAKLTERERQARLMKLKLQERKMRQENKFDEANSLLSQGIKDQAELARLLGATKTEQEEKLKQRLERKKQLKEEREAQGLEANDEVLDEIVQHEMSRKEILEDRKKRHNILEGLNNHFEDEKNALLAALRSQDDTLQSEKERQLALAKLRRDQRKLQDEEKFEAAAALFGLAQQHEKTREANYEKDKERQKQLARERLAARRAKMAGDEKGEQAKHLTRSDIQEQLLLEEKENAKADAAHATKSDPVSLVSTVMDEVDKKQSSERDVLVTLIDGAMANSKERTRLEELALKDLLAQLEALKEERRQLREDSDLEFGDVDVSGLSEEELSRHLTQVSEYQEQQHRLLKSAINIKIEMMRRSLIEEKRLSLEEIEEELAVMMLSELQQKQSVEVNALHHVLEGFPGDNSKPQGHPGGLDKRHSMASIASGVGHSFKELFFSESTEVIKNEEFLHQMKVTQRRARREGWLDNVAVTVFDHTTVTLEMTTEIEEMTRRIQAREGALLTMDKELEEKKAEVMKNESGRTAEELDAMIAKLEKEYADRKKALEEEQTRERRQEAEMKDVNQELEQKEQDLQNLEQEMQEAIENERKRRPNEEFDAEAMMAEIEAQFAAKKRAMQVQLEKQRRQAMEKIAARKQRMEDRNYEDEMAVALIHAAEKSKTQKEEAAVEQKNKQNQLPVITDPSPRKPKKKGKKGVSFGEPPKADKVAGPGLMREKTVLDVDMSEDEKQNLSKMLLSHHSKAQWKMEKEREKRANELKERLEMRKTRIQDAATTILGLGERQKTMVENKKKDERERQIALVKERVQRVRYERTQTMKFKGDDKKRFKDYLEKEDSGLSEDEKMTKIADRINSQFKRHESSYRAGHKSAFEPDEDELASNSSGSKPATPQGSARPKTGRLLGQKEREQLIKSRQAKRREIKKVNNSISAAPDMDSLAKMIEDRKKAGMQQEEEEEEDNGSEV

SEQ ID NO: 115 - DNA, 2280 bp, Trypanosoma cruzi
  CDS (1)..(2280)
atgcgcaaaaacgaaagagacgctctttccctgtacgtctcctttgctttcagtcttttatcatatgggaagggattcctgtgcaaatttctggtgtcttttatccatttctctctattttttttttttaatttctgttccttattattattattattttttttttttccattgaggccttatgatgacagaatgaacattattgtgtcttgcagggcgtctgaggttgactcgattacctcattttttcgaaaagagcgaattcccacgcccacggctgtgtgtaccgctgaatctaccgctgactttgtcactcgacatgttcgtgcggtcgtagatggctgtggatccaataataacgatgaggatggtgaggggacgaaggcatcggttgtggacgtcgtggcaatcggagtagatgacgtgatgttggataaattttttttgaacagcctgtctcgtcacgttgtgtgtgcgtttctctccggaggggctgccgttgcggtatcgttggtggtctttccgaccccccatgacgcacggcagaggagcgttgacatcacagcgaaattattcactgaggcagtgggcgatggtggcgtgtacattcacagcgtctcggagtacgacagaatcatagaattgttgacaaacagcccgtccttttgtcacattttcccggtttcctccttgctgctgcggctgtgccctcaaggagaacaagcagcttgtgtggtgaatatgtggtggctgcagacgtcgcatgttcagttattttttcccgctgacggactgcttgacgcgcggcgattgccccatcgtgttgtcgttttccccgtgcgtgacacgaatgagttgcagttgcgattggcttccattggattcatccgtgcagcgaaaggttcccctgacgcgcagcttcaagggcccgttgtggaggagaaggagagggaaatgctgaaggcagatttgcaggcagtgcgtgacgaattcgagtcaactcgtacgaccattcagcagcagaaatccaggaacgaggcgttggaaggcacgatacttcgtttacgtgaaaaggtgcgtggcttggccagggagcaaaggcgtttagagagcgagtgtagcgcggcgcggcactcgagggaacagttggaagaggacatgcgccagcaggtggacatgcgtaatgagatggaaggtcgacgagttgcgcatcttcgccgacagttggagtgggagctgaggatggaaagaggacgcgtagaaagctactgtgcccaccttgcgagaattcgggaggaagaaaataaacgcacagtaatgcacagggaagctctagacagggaaataggcgctgctcgagagcagaaagagaggcttttgggcatcatttcccggaaaaggagggatacatctcttcgttccgtgtttgggacgtctcgatcgacttcgacaagggaaacgagtttgatgagggcgcacacaagcgatgtggaggtgtcgagccgcccatacgaggactcagaactgtgccgtgtgaacgagcaatgccagcgtctcagccgcctgtgtgctgccctccgtgtggaaagggacgagcttgcgactttcgagcaatcatgggcgctaggagtggaagaggacgaggtaagagacagcggtgacgatgatgggtttgagaggggtatccgtctgaagagcgaagatgtgaggcaaatggcgcgggagactctggaaagagaagaacacgtcacgcgagaggctttttgcgccatcgaggaggcaaggagggcggagtttgactgggattgggtggtttgtacgcagtgcctgagctgtgcgtctttatttgtttcaggcgaggggagtcggcctccctacggtgcgagggagcagcaacgacgcgaattgactctttgcgaactcgaacgcgtaggccgattgaaggcggcggtgcaacgggaaatgcaaaggatccacctggaaggtgccatccgcgagcggtccgtgcgccaactcgtggaccagctgcgagtggagtctgagcgactggcccaggaacgcaacgcgtgtgcggaagttatggcgagcgagaaaaaggcggccgaggcggaggcagaggcgttgcggcacacacttcagcttcttcattcatgcatgaatatacgtctccctctttccggcccctttttctccactgggcccggtgggaactggcacacactctctcatgcaataacggctctgggacggcgtgtgcagcgtgaggctgaccttttgtaa

SEQ ID NO: 116 - protein, 759 aa, Trypanosoma cruzi
MRKNERDALSLYVSFAFSLLSYGKGFLCKFLVSFIHFSLFFFFNFCSLLLLLFFFFPLRPYDDRMNIIVSCRASEVDSITSFFRKERIPTPTAVCTAESTADFVTRHVRAVVDGCGSNNNDEDGEGTKASVVDVVAIGVDDVMLDKFFLNSLSRHVVCAFLSGGAAVAVSLVVFPTPHDARQRSVDITAKLFTEAVGDGGVYIHSVSEYDRIIELLTNSPSFCHIFPVSSLLLRLCPQGEQAACVVNMWWLQTSHVQLFFPADGLLDARRLPHRVVVFPVRDTNELQLRLASIGFIRAAKGSPDAQLQGPVVEEKEREMLKADLQAVRDEFESTRTTIQQQKSRNEALEGTILRLREKVRGLAREQRRLESECSAARHSREQLEEDMRQQVDMRNEMEGRRVAHLRRQLEWELRMERGRVESYCAHLARIREEENKRTVMHREALDREIGAAREQKERLLGIISRKRRDTSLRSVFGTSRSTSTRETSLMRAHTSDVEVSSRPYEDSELCRVNEQCQRLSRLCAALRVERDELATFEQSWALGVEEDEVRDSGDDDGFERGIRLKSEDVRQMARETLEREEHVTREAFCAIEEARRAEFDWDWVVCTQCLSCASLFVSGEGSRPPYGAREQQRRELTLCELERVGRLKAAVQREMQRIHLEGAIRERSVRQLVDQLRVESERLAQERNACAEVMASEKKAAEAEAEALRHTLQLLHSCMNIRLPLSGPFFSTGPGGNWHTLSHAITALGRRVQREADLL

SEQ ID NO: 117 - DNA, 3081 bp, Giardia lamblia ATCC 50803
  CDS (1)..(3081)
atgtctagtttcaagcagatcaaccctgcggataagattaccgatccgccgacttccccgcggtccattgtggccatgaacaggtgtgggataacgccaccagacatactttacgtttctcgcgaagaactaaagcatcgcattgcatacaagaatctaacggataaggagtttgtcatctactacgataactatgaggcaatgcggaaagaggctctgagccaagctatagccgagtaccagctaattttagagcaaggaatttcgaaggccgaggctgcgctttacccccacttgcgctttccaaacgttacttcagctccatctacaccgcgaggggggcttttgcagacatccacgcataacccggacgagctcaaggccaaaatcattgaacgtcatattaaggaagtggagctcaatctccgacagcgcattgctaaggaagcacaacaacagcttcaacttgaggctgcacaagagcatcgcctgaaggcccaggagattgaaaatagaatgactgctaagtatgaggacgaggccattaagtacattcttcaggagcagcaccgccttgagatctttagtagctttcagcgccagcaggaggaatgcaggaaacgctcatatgcaaagactatccaggaaatgcatgcacatgatgctctgctccagcgtcgtcagcgttatctcgacgaccaatctgtccgctccaagacgcgctcggttcctcgagaggagttcttgtatcaactggcccaagagcgcaaggcagaagaccgggcacgcgagcttgagttcaaggagcgacaacttattcgagaacaaaggagccagcgtgcacaagaaaagaagcggcaggaagtggagagacttcagcagtctttgcgcgaaaatcagctgcggcacacaaaagtgttcaacgagtattgggaagacgttgctcgttccaaatcagtggatcatgcgctaagggagaaccgtcgtctggcaggtgctaagcgcgcatctacagaaaaattgaaggagaacgccgaacggatcagcgaaaccagtcagcgcatagaagtaacgctgaagaatttcggaaagatatatcgtaataagcaagatgcaaaggcgcgcaaacttgaagaagaggagcttcgctctagcagacacatccttgagacgtctgttaatgcgcgtcaacgagccttagaggacgaactgctgaaggatctacggacaaagagggcggagatgcatcttcggagggttcagtacgagaaagaaaatgtgctctcgaataaggagttcaaggcgataaattccatcagagctctgaacatgacaaaggagaaggaagaggagcttatggccctttcaaacaaactccacactcaaaggcatatactaaaaggtagccaaacaattcgtgatgatggctatttggacattccagatgatcttagaaaactggcgccgcctgagagtattcttaagtgccactatatggacgaggccattgacatgctcaagggagaagaaagctttaagcgcacccttcggatggtgcccgtttcagaatcgtatgcttcagtctataaatcgatagataccgagcctcgtaaaaagaagccaactaagagtcagcatgttgcccgccacaacagtatcagtgatttcagcatggacacgccagacagtgggcgcccgtactatcaggtgaaaaactcgcgcccactaaggtctagctccaacggtgatgggcttctcgttgaaagaaggtctaagagcttaacaaggccgcggacagcatcacgaagtggtcctgcagcactagatagttcccggaccgattccactcctggttcgtcctacttgggaggccatcatagtggagctcaagtagcatctgtaccccttcgacccggtgacgcttcacgaccaaagaaggcagcaaaacgtggctcgtccaagtcgaaagtctcccacaactctatgcgctctgcatctgactccaccattgaaacgcctcagtggagcgattcggtatctagcaacatcagctccacaaagaaaaaagccacccgcctccgaagtgatgacgctaatttgtcggtcagcttgcctctccctgcattgaagggccccgggtcagggttgattgaagaagagaagaagcgcaatgctactgtgcggcaatcaaagaaagaaagaccgagagatagtcagcgaaataaatctaagacagacaccgaagctgcacaggatagccttctgcggaatcaatccctggagatagtccgccaactgagtcaattaacaaaacttaacaagccagctatcagtaactttccaccaccagatgagcgtcgcgagttgcttggcaagctaacaggtgccactcaggaacccgactatgatactgagaatagaacacagcagatatacgctagcctctccatccgtgcaaacgaggcgggtatggatccgaaacagtttgagcaagacgtgttaccagagcacacccagacacggcacctgtttgcttcactgggcaagtctagcacgcctaacgatcacatggatggtgatctaattctcaccacattttccaaagctacgcctgaagcaacgcagatcaacgatgacacacccaaatactttgcgcccggaagcatgaccctcatgcaagaaagtgcaccgccaagccgcaacattggggatggcagcaccaaggactatgtggccactcttgagtatcctaatgtaaaggggaacgacggacttcgtccagccgagctgtccacatactcgattgtcctgcctcccgtgtccgcaggcgcagggattcctcgggtggctcaggagccacaatcccctcagcgcgttgtcaattttgggatagatgtcacggcaagtgatctaaaaataagttcattggaaaaggttccagatacaagtgagccggcatttatcgacgacagcttgccggccgaagaagctgccacagccccgaatacacgcgaatccataggatactttgtctccagcagcgcaaatgtccatggtgacaacacagatgaggaaaattaa

SEQ ID NO: 118 - protein, 1026 aa, Giardia lamblia ATCC 50803
MSSFKQINPADKITDPPTSPRSIVAMNRCGITPPDILYVSREELKHRIAYKNLTDKEFVIYYDNYEAMRKEALSQAIAEYQLILEQGISKAEAALYPHLRFPNVTSAPSTPRGGLLQTSTHNPDELKAKIIERHIKEVELNLRQRIAKEAQQQLQLEAAQEHRLKAQEIENRMTAKYEDEAIKYILQEQHRLEIFSSFQRQQEECRKRSYAKTIQEMHAHDALLQRRQRYLDDQSVRSKTRSVPREEFLYQLAQERKAEDRARELEFKERQLIREQRSQRAQEKKRQEVERLQQSLRENQLRHTKVFNEYWEDVARSKSVDHALRENRRLAGAKRASTEKLKENAERISETSQRIEVTLKNFGKIYRNKQDAKARKLEEEELRSSRHILETSVNARQRALEDELLKDLRTKRAEMHLRRVQYEKENVLSNKEFKAINSIRALNMTKEKEEELMALSNKLHTQRHILKGSQTIRDDGYLDIPDDLRKLAPPESILKCHYMDEAIDMLKGEESFKRTLRMVPVSESYASVYKSIDTEPRKKKPTKSQHVARHNSISDFSMDTPDSGRPYYQVKNSRPLRSSSNGDGLLVERRSKSLTRPRTASRSGPAALDSSRTDSTPGSSYLGGHHSGAQVASVPLRPGDASRPKKAAKRGSSKSKVSHNSMRSASDSTIETPQWSDSVSSNISSTKKKATRLRSDDANLSVSLPLPALKGPGSGLIEEEKKRNATVRQSKKERPRDSQRNKSKTDTEAAQDSLLRNQSLEIVRQLSQLTKLNKPAISNFPPPDERRELLGKLTGATQEPDYDTENRTQQIYASLSIRANEAGMDPKQFEQDVLPEHTQTRHLFASLGKSSTPNDHMDGDLILTTFSKATPEATQINDDTPKYFAPGSMTLMQESAPPSRNIGDGSTKDYVATLEYPNVKGNDGLRPAELSTYSIVLPPVSAGAGIPRVAQEPQSPQRVVNFGIDVTASDLKISSLEKVPDTSEPAFIDDSLPAEEAATAPNTRESIGYFVSSSANVHGDNTDEEN

SEQ ID NO: 119 - DNA, 1830 bp, Aspergillus fumigatus Af293
  CDS (1)..(1830)
atgtcccgacgaggacgaaaccatgactactacgaggagcacttctacgaaaaagagagcgatacatatcgacgtccgcagcggtctcgacacaagcgcttcgcccaagacgatgaatacgatgaattgaaacatggaagtcgaatgtccccgccacttcccgtggacgagttgacgcgtctacacatacaagaacggtcaaagcccgactttattcatgagagctttgatccaccgcggtaccctggccctctcgctgtgatgcgagagagggaggaaaatgagatggacatgcttccgccagagacattgaggggctacgagctggacaggcacgagcgtcgtgagcgacctcggcataggagaactgctaagggggaggatgtttattttcaggagaaatcgcaaagacagaggtatacaagggctgaatatgacgagggagaatttgagctgcaaagggaaaggccatcaataccgcgatccaacttggatagcgatgaggaacttgtacgtttacgtagcgacaagaaagggaagaaaggctcgcgcgtgaagcacgcggatcttgagattgagcgagatgagctttatcgccgtgggtctgacgccaggtgggagcacaccaggcttcacagtgatgttagagaacgcacaccagcagcacacttacgatcccaccggcaccggcagccggatggagacgaagaggatgcagaggatatcattatccaaagagatgagcggaggggtcgaagcggcaggttcaaggaaaaggaaaagattaccatgcgagaaagagaaatctcgacgtctccggagtcgccaagttcgagagagctttcgcaggtccggaagtctcatgttacatctcgtgaacgcatgagagatggttatgaactgcctcgtgcaccacttgcacccagtccagatccttcttctccaagtagcttcgaggagttggagattcgtcaccgtacacggggacgcccaaggaaggagaagattattatagaacgacgcgatgatacttcacctccatcaatactttcatcctcagaatcaggcaacaaaagcgaggacgaacttgacatcactcacgcaaatctcaagacctcaaacagaagagaggacgttttgattatggaacgtcaaccccaaccccacgagagtgatgaagaggtccatgtctttgaggaggaacagtacacccggcacgatgcgggagggcctcagcgacggagcacacctacagtcacgattgaagataaagcgatagttcgggccgattcaggaagtcatggcagtgcagaccagcagatgcgacgggagcgccgtgtatccacacagcgatcccgatccatcaagggccacagaaggctgtctgacgagaacatcgactgcaaagacggtcgaatcggacggcgatacattggcgtaaaagacaagcgagatcgactctggacagaaatcaccaaggacctggtggtcagggaggccattgagcgggccggctatgaatacgaggaaacggactcgttctattacatattctcgtatcttggatatgacgatatatcggctcttgtcgcactatcggaggacatccgccgcgcacgacgccaacgaattcaggagatcaggagggagcgaggctccatgcgtattccatttgcacctgagccagttacacccgctcccgtgttaccggggaggccgccgtctccgcgcctccggactcgggatgagcggagacttaagaaagagcgggagctcattattgaagaaggacggtggagaccaggtccagctccattgaagagatggtga

SEQ ID NO: 120 - protein, 609 aa, Aspergillus fumigatus Af293
MSRRGRNHDYYEEHFYEKESDTYRRPQRSRHKRFAQDDEYDELKHGSRMSPPLPVDELTRLHIQERSKPDFIHESFDPPRYPGPLAVMREREENEMDMLPPETLRGYELDRHERRERPRHRRTAKGEDVYFQEKSQRQRYTRAEYDEGEFELQRERPSIPRSNLDSDEELVRLRSDKKGKKGSRVKHADLEIERDELYRRGSDARWEHTRLHSDVRERTPAAHLRSHRHRQPDGDEEDAEDIIIQRDERRGRSGRFKEKEKITMREREISTSPESPSSRELSQVRKSHVTSRERMRDGYELPRAPLAPSPDPSSPSSFEELEIRHRTRGRPRKEKIIIERRDDTSPPSILSSSESGNKSEDELDITHANLKTSNRREDVLIMERQPQPHESDEEVHVFEEEQYTRHDAGGPQRRSTPTVTIEDKAIVRADSGSHGSADQQMRRERRVSTQRSRSIKGHRRLSDENIDCKDGRIGRRYIGVKDKRDRLWTEITKDLVVREAIERAGYEYEETDSFYYIFSYLGYDDISALVALSEDIRRARRQRIQEIRRERGSMRIPFAPEPVTPAPVLPGRPPSPRLRTRDERRLKKERELIIEEGRWRPGPAPLKRW

SEQ ID NO: 121 - DNA, 4221 bp, Oryctolagus cuniculus
  CDS (1)..(4221)
atgtctccacttttgaaaagcatcattgatattattgaaattttcaaccaatatgcctcacatgactgtgatggggcagtactaaagaagaaagacctaaagatccttcttgacagggaatttggagctgtccttcagagaccacatgaccctgagacggtagacgtgatgctagaacttctggatcgcgactctgatggtctggtcgggttcgatgaattctgcctacttattttcaagttggctcaagcggcttattatgcacttggccaggcctcagggttagacgaggaaaagcggtcccacggtgagggcaaggggcgcctgttacaaaatcgcaggcaagaagatcaaaggagattcgaactccgggacagacaattcgaagatgaaccagagcgacgacgctggcaaaagcaggaacaggagagggagctcgctgaggaagaggaacagaggaagaaacgagagcgattcgagcagcactacagtaggcagtaccgcgacaaggagcagcggctccaaaggcaagaactagaagagcgccgcgcagaggaagagcagctgcgaaggcgcaagggtcgcgacgcagaggagttcattgaggaagagcagctgcgaaggcgagagcagcaagagctgaagagggagctccgcgaggaggagcagcaaaggcgagagcgccgagagcagcacgagcgggcgctccaggaggaagaagagcagctgctgagacagaggcgctggcgcgaggaaccacgcgagcagcagcagctgaggcgcgagctggaagagatacgcgaacgcgagcagagacttgagcaggaggagaggcgcgagcagcagctgaggcgcgagcagagacttgagcaggaggagaggcgcgagcagcagctgaggcgcgagctggaagagatacgcgaacgcgagcagaggcttgagcaggaggagaggcgcgagcagcgacttgagcaggaggagaggcgcgagcagcagctgaagcgcgagctggaagagatacgcgaacgcgagcagaggcttgagcaggaggagaggcgcgagcagctgctggctgaggaggtgcgggaacaggcccgggagcgaggcgagagcctcacccggaggtggcagcggcagctagagagtgaggccggcgcacgtcagagcaaagtctactccaggccccgcaggcaggaagagcagagtctccgccaggaccaggagaggaggcagcgccaggaacgtgaacgggagctggaagagcaggcccgccggcagcagcagtggcaagcagaagaagagagcgagaggcgccgccagaggctgtcggccaggccctcgttgcgcgagaggcagctgagggcggaggagcgccaggagcaggaacaacggttccgggaggaggaggagcagcggcgcgagaggaggcaggagctgcagttcctcgaggaggaggagcagctccagcgacgggagcgtgcccaacagctccaggaagaggacagctttcaggaggatcgggagaggaggcgacgccaacaggagcagcgccccggccaaacatggaggtggcaactccaggaagaagcccaaagacgccgtcacacgctgtacgccaaaccggggcagcaggagcagctgagggaggaagaggagctgcaaagggagaagaggcgccaggagcgggagagagaatatcgggaggaagagaaactgcagagagaggaagacgagaagagacgacgccaggaacgcgagagacaataccgggagttagaggagctgcggcaggaagagcagctgcgtgacaggaaactccgcgaggaggagcagctccttcaagaaagggaggaagagaggctgcgccgccaggaacgcgagaggaaactccgcgaggaggagcagctgctgcgccaggaggagcaggagctccgccaggaacgcgagaggaaactccgcgaggaggagcagctgctgcgtcgggaggagcaggagctccgccaggaacgcgagaggaaactccgcgaagaggagcagctgcttcaggagagggaggaagagaggctgcgccgtcaggaacgcgccaggaaactccgtgaggaggagcagctgctgcgccaggaggagcaggagctccgccaggaacgggagaggaaactccgcgaggaggagcagctgctgagacgcgaggagcagctactgcgccaggaacgcgacaggaaactccgcgaagaggagcagctccttcaggaaagcgaggaagagaggctgcgtcgccaggaacgcgagcaacaacttcgtcgggagcgcgacagaaagttccgcgaggaggagcagctccttcaggagagggaggaagagcggctgcgccgtcaggaacgcgagaggaaactccgtgaggaggagcagctccttcaggagagggaggaagagcggctgcgccgtcaggaacgcgagaggaaactccgtgaggaggagcagctccttcaggagagggaggaagagcggctgcgccgtcaggaacgcgagaggaaactccgtgaggaggagcagctgctgcgccaggaggagcaggagctccgccaggaacgcgccaggaaactccgtgaggaggagcagctgctgcgccaggaggagcaggagctccgccaggaacgcgacaggaaactccgcgaggaggagcagctgctgcgccaggaggagcaggagctccgccaggaacgcgacaggaaactccgcgaagaggagcagctccttcaggaaagcgaggaagagaggctgcgccgtcaggaacgcgagaggaaactccgtgaagaggagcagctgctgcgtcgggaggagcaggagctccgtcgggaacgcgccaggaaactccgtgaggaggagcagctgcttcaggagagggaggaagagaggctgcgccgtcaggagcgcgccaggaaactccgtgaggaggagcagctgctgcgccgggaggagcaggagcttcgtcaggagcgcgacagaaagttccgcgaagaggagcagctgcttcaggagagggaggaagagaggctgcgccgtcaggaacgcgacagaaagttccgcgaggaagaaagacagcttcgtcgccaggaactcgaggaacagtttcgtcaggagcgcgatagaaaattccgcttagaggaacagatccgccaggagaaggaggaaaagcagctgcgccgtcaggagcgcgacaggaaattccgcgaggaggagcagcagcgacgccgccaggaacgcgagcaacaacttcgtcgggagcgcgacagaaagttccgcgaggaggagcagctccttcaggagagggaggaagagcggctgcgccgtcaggagcgcgccaggaaactccgcgaggaggagcagctgctgagacgcgaggagcagctactgcgccaggaacgcgacagaaagttccgcgaggaggagcagctgcttcaggaaagcgaggaagagaggctgcgccgccaggaacgcgagaggaaactccgcgaggaggagcagctgcttcaggaaagggaggaagagcggctgcgccgtcaggagcgcgccaggaaactccgcgaggaggagcagctgctgcgccaggaggagcaggagctccgccaggaacgcgccaggaaactccgcgaggaggagcagctgctgcgccaggaggagcaggagctccgccaggaacgcgacagaaagttccgtgaggaggagcagctgctgcgtcgggaggagcaggagctccgtcgggagcgcgacagaaagttccgcgaggaggagcagctgcttcaggaaagggaggaagagcggctgcgccgtcaggagcgcgccaggaaactccgcgaggaagaagagcaactgctgtttgaggagcaggaagagcagaggctccggcaggagcgagaccggcggtaccgagcagaggagcagtttgccagagaggagaagagccgtcgtctggaaagagagctgcgtcaagaagaagagcagagacgccgccgggaacgggagaggaaattccgggaagagcagctccgccgccagcaggaggaggagcagaggcgccgccaactgcgggagagacaattccgagaagatcagagccgtcggcaagttctggagcccggtacacgtcagtttgctagggtcccggtgcgctccagccctctttatgaatacatccaagagcagagatctcagtaccgcccc

SEQ ID NO: 122 - protein, 1407 aa, Oryctolagus cuniculus
MSPLLKSIIDIIEIFNQYASHDCDGAVLKKKDLKILLDREFGAVLQRPHDPETVDVMLELLDRDSDGLVGFDEFCLLIFKLAQAAYYALGQASGLDEEKRSHGEGKGRLLQNRRQEDQRRFELRDRQFEDEPERRRWQKQEQERELAEEEEQRKKRERFEQHYSRQYRDKEQRLQRQELEERRAEEEQLRRRKGRDAEEFIEEEQLRRREQQELKRELREEEQQRRERREQHERALQEEEEQLLRQRRWREEPREQQQLRRELEEIREREQRLEQEERREQQLRREQRLEQEERREQQLRRELEEIREREQRLEQEERREQRLEQEERREQQLKRELEEIREREQRLEQEERREQLLAEEVREQARERGESLTRRWQRQLESEAGARQSKVYSRPRRQEEQSLRQDQERRQRQERERELEEQARRQQQWQAEEESERRRQRLSARPSLRERQLRAEERQEQEQRFREEEEQRRERRQELQFLEEEEQLQRRERAQQLQEEDSFQEDRERRRRQQEQRPGQTWRWQLQEEAQRRRHTLYAKPGQQEQLREEEELQREKRRQEREREYREEEKLQREEDEKRRRQERERQYRELEELRQEEQLRDRKLREEEQLLQEREEERLRRQERERKLREEEQLLRQEEQELRQERERKLREEEQLLRREEQELRQERERKLREEEQLLQEREEERLRRQERARKLREEEQLLRQEEQELRQERERKLREEEQLLRREEQLLRQERDRKLREEEQLLQESEEERLRRQEREQQLRRERDRKFREEEQLLQEREEERLRRQERERKLREEEQLLQEREEERLRRQERERKLREEEQLLQEREEERLRRQERERKLREEEQLLRQEEQELRQERARKLREEEQLLRQEEQELRQERDRKLREEEQLLRQEEQELRQERDRKLREEEQLLQESEEERLRRQERERKLREEEQLLRREEQELRRERARKLREEEQLLQEREEERLRRQERARKLREEEQLLRREEQELRQERDRKFREEEQLLQEREEERLRRQERDRKFREEERQLRRQELEEQFRQERDRKFRLEEQIRQEKEEKQLRRQERDRKFREEEQQRRRQEREQQLRRERDRKFREEEQLLQEREEERLRRQERARKLREEEQLLRREEQLLRQERDRKFREEEQLLQESEEERLRRQERERKLREEEQLLQEREEERLRRQERARKLREEEQLLRQEEQELRQERARKLREEEQLLRQEEQELRQERDRKFREEEQLLRREEQELRRERDRKFREEEQLLQEREEERLRRQERARKLREEEEQLLFEEQEEQRLRQERDRRYRAEEQFAREEKSRRLERELRQEEEQRRRRERERKFREEQLRRQQEEEQRRRQLRERQFREDQSRRQVLEPGTRQFARVPVRSSPLYEYIQEQRSQYRP

SEQ ID NO: 123 - DNA, 2025 bp, Pan troglodytes
  CDS (1)..(2025)
atggaggtgaaggacacaggatcagccaaatcccctgtccagcaaggagaaggacacaggatcagccaaaccccctctccacggagacaaaggacacagaatcagccacatcccctctccacggaggcgaaggacacaggatcagccaaaccccctttccatggaggtgaaggacacagaatcagccaaaccccctctccaccaaggagaaggacacaggatcagccaaaccccctcaccacggaggcgaaggacacaggatcagccaaaccccctctccaccaaggagaaggacacagaatcagccacatcccctctccatggaggcgaaggacacagaatcagccaaaccccctctccacggaggcgaaggacacaggatcagccaaatcccctctccagcaaggagaaggacacaggatcagccaaaccccctctccacggagacaaaggacacagaatcagccacatcccctctccacggaggcgaaggacacagaatcagccaaactccctctccatggaggtgaaggagctgctgcaactgacggagggaccgtccaattgcttggagggctgctcagaggagacacccagcagaaactatgtcagaggctgctcagagaagacacccagcagacactatgtcagaggctgctaagaggagacacccagcagacgctatgtcagaggctgctcagaggagacacccagcagacactatgtcagaggctgctcagtgaagagactcagcagacactatgtcagaggctgctcagagaagggacccagcagacactatgtcagaggctgctcagagaagggacccagcagacactatgtcagaggctgctcagagaagacacccagcagacactctgtcagaggctgctcagagaagacacccagcagacactatgtgagaggctgctcagagaagggacccagcagacgctatgtcataggttgctcagagaagggacccagcagacactatgtcagaggctgttcagaggagacacccagcagacactatgtcagaggctgctcagaggagacacccagcagacactatgtgagaggctgctcagagaagagacccagcagacacgatgtcagaggctgctcagtgaagagacccagcagacacgatgtcagaggctgctcagagaagacacccagcagacactatgtgagaggctgctcagagaagggacccagcagacacgatgtcagaggctgctcagagaagggacccagcagacacgatgtcagaggctgctcagaggagacacccagcagacactatgtcagaggctgcttagagaagggacccagcagacgctatgtgataggttgctcagagaagacgcccagcagaccctatgtcaaaggctgctcagtagagagagacccagaagacactatgtcagaggctgcttagagaagggacccagcagacgctatgtcagaggctgctcagaggagacacccagcagacgctatgtcagaggctgctcagaagagacacgaggcagacgctataggctgctcagtgaagagactcagcagacactatgtcagaggctgctcagagaagggacccagcagacactatgtcagaggctgctcagagaagggacccagcagacactatgtcagaggctgctcagagaagggacccagcagacactatgtcagaggctgctcagagaagacacccagcagacactctgtcagaggctgctcagagaagacacccagcagacactatgtgagaggctgctcagagaagggacccagcagacgctatgtcataggttgctcagagaagacgcccagcagacactatgtcaaaggctgctcagagaagagacccagaagacactaagtcagaggctgcttagagaagggacccagcagacgctacgtcagaggctgctcagaggagacacccagcagacgctatgtcagaggctgctcagaggagacacccagcagacactatgtcagaggctgctctag

SEQ ID NO: 124 - protein, 674 aa, Pan troglodytes
MEVKDTGSAKSPVQQGEGHRISQTPSPRRQRTQNQPHPLSTEAKDTGSAKPPFHGGEGHRISQTPSPPRRRTQDQPNPLTTEAKDTGSAKPPLHQGEGHRISHIPSPWRRRTQNQPNPLSTEAKDTGSAKSPLQQGEGHRISQTPSPRRQRTQNQPHPLSTEAKDTESAKLPLHGGEGAAATDGGTVQLLGGLLRGDTQQKLCQRLLREDTQQTLCQRLLRGDTQQTLCQRLLRGDTQQTLCQRLLSEETQQTLCQRLLREGTQQTLCQRLLREGTQQTLCQRLLREDTQQTLCQRLLREDTQQTLCERLLREGTQQTLCHRLLREGTQQTLCQRLFRGDTQQTLCQRLLRGDTQQTLCERLLREETQQTRCQRLLSEETQQTRCQRLLREDTQQTLCERLLREGTQQTRCQRLLREGTQQTRCQRLLRGDTQQTLCQRLLREGTQQTLCDRLLREDAQQTLCQRLLSRERPRRHYVRGCLEKGPSRRYVRGCSEETPSRRYVRGCSEETRGRRYRLLSEETQQTLCQRLLREGTQQTLCQRLLREGTQQTLCQRLLREGTQQTLCQRLLREDTQQTLCQRLLREDTQQTLCERLLREGTQQTLCHRLLREDAQQTLCQRLLREETQKTLSQRLLREGTQQTLRQRLLRGDTQQTLCQRLLRGDTQQTLCQRLL

SEQ ID NO: 125 - DNA, 5694 bp, Homo sapiens
  CDS (1)..(5694)
atgtctccacttctgagaagcatctgtgacatcactgaaattttcaatcagtatgtctctcatgattgtgatggagcagcattaactaagaaagacctgaagaacctccttgaaagggaatttggagctgtgcttcggagaccacatgaccctaagacggtagatctgatcctggaacttctggatcgtgacagtaatgggcgtgtcgatttcaacgaattcctcctatttattttcaaagtggctcaagcttgttactatgctctcggccaggccacgggactggatgaggagaagcgagcccggtgtgacggaaaggagagcctgttacaagatcgacggacagaagaagaccaaaggagattcgagccccgggacagacaactggaagaagaacctgggcaacgacgcaggcagaagaggcaggaacaggagagggagctagctgagggagaggagcaaagtgagaaacaagagcgacttgaacagcgcgacaggcagcgccgcgacgaggagctgtggcggcaaaggcaagaatggcaagaacgggaagagcgccgtgcagaggaagagcagctgcagagttgcaaaggtcacgaaactgaggagtttccagacgaagagcaactgcgaaggcgggagctgctggagctgaggaggaagggccgcgaggagaaacagcagcaaaggcgagagcgccaagacagagtgttccaggaggaagaagagaaagagtggaggaagcgcgagacagtgctccggaaggaagaagagaagttgcaggaagaggagccgcagcggcaaagagagctccaggaggaagaagagcagctacggaagctggagcggcaagagctgaggagggagcgccaggaggaagagcagcagcagcaaaggctgaggcgcgagcagcaactaaggcgcaagcaggaggaggagaggcgcgagcagcaggaggagaggcgcgagcagcaggagaggcgcgagcagcaggaggagaggcgcgagcagcagctgaggcgcgagcaggaggagaggcgcgagcagcagctgaggcgcgagcaggaggaggagaggcgcgagcagcagctgaggcgcgagcaggaggaggagaggcgcgagcagcagctgaggcgcgagcaggaggaggagaggcgcgagcagcagctgaggcgcgagcagcagctgaggcgcgagcagcagctgaggcgcgagcagcagctgaggcgcgagcagcagctgaggcgcgagcagcagctgaggcgcgagcagcagctgaggcgcgagcagcagctgaggcgcgagcagcagctgaggcgcgagcagcagctgaggcgcgagcaggaggaggagaggcacgagcagaagcacgagcaggagaggcgcgagcagcggctgaagcgcgagcaggaggagaggcgcgattggctgaagcgcgaggaggagacggagaggcacgagcaggagaggcgcaagcagcagctgaagcgcgaccaggaggaggagaggcgcgaacgttggctgaagctcgaggaggaggagaggcgcgagcagcaggagaggcgcgagcagcaactaaggcgggagcaagaggagaggcgcgagcagcggctgaagcgccaggaggaggaagagaggctccagcagcggttgaggagcgagcaacaactaagacgcgagcaggaggagaggctcgagcagctgctgaagcgcgaggaggagaagaggctcgagcaggagaggcgagagcagcggctgaagcgcgagcaggaggagaggcgcgatcagctgctgaagcgcgaggaggagaggcgccagcagcggctgaagcgcgagcaggaagagaggctcgagcagcgactgaagcgcgaggaggtggagagactcgagcaggaggagaggcgcgacgagcggctgaagcgcgaggagccggaggaagagaggcgccacgagctgctgaagagcgaggagcaggaggagaggcgccacgagcaactgaggcgcgagcagcaggaaaggcgcgagcagcggctgaagcgcgaggaggaggaagagaggctcgagcagcggctgaagcgcgagcatgaggaagagaggcgcgagcaggagctagctgaggaggagcaggaacaggcccgggagcggattaagagccgcatcccgaagtggcagtggcagctagaaagcgaggccgacgcacggcaaagcaaagtcttactcgaggccccgcaagcaggaagggcagaggcgccgcaagagcaggaggaaaagaggcggcgcgagagtgagctgcaatggcaggaggaggaacgggctcaccggcagcagcaggaagaggagcagcgccgggacttcacatggcagtggcaggcggaggaaaagagcgagaggggccgtcagaggctgtcggccaggcccccattgcgggagcagcgggagaggcagctgagggccgaggagcgccagcagcgggaacaacggtttctcccggaggaggaggagaaggagcagcgcggccgccagcgacgcgagagggagaaagagctgcagttcctggaggaagaggagcagctccagcggcgggagcgtgcccaacagctccaggaggaggaggacggcctccaggaggatcaggagaggaggcgacaggagcagcgccgcgaccaaaaatggaggtggcaactagaagaagaaaggaagagacgccgccacacgctgtacgccaagccagccctacaagagcagctgaggaaggaacagcagctgctgcaggaggaggaggaggagctacagagagaggagcgcgagaagagaaggcgccaagaacaggagagacaataccgcgaggaagagcagctgcagcaggaggaagagcagctgctgagagaggaacgggagaaaagaagacgccaggagcgggaaaggcaatatcggaaggataagaagctgcagcagaaggaagagcagctgctgggagaggaaccggagaagagaaggcgccaggagcgggagaaaaaataccgcgaggaagaggagttgcagcaggaggaagagcagctgctgagagaggaacgggagaagagaaggcgccaggagtgggagaggcagtaccgcaaaaaagacgagctgcagcaggaagaagagcagctgctgagagaggaacgggagaaaagaagactccaggagcgggagaggcaatatcgggaggaagaggagctgcagcaggaggaagagcagctgctgggagaggaacgggagacgagaaggcgccaggagctggagaggcaatatcggaaggaagaggagctgcagcaggaggaagagcagctgctgagagaggaaccggagaagagaaggcgccaggagcgggagaggcaatgtcgggaggaagaggagctgcagcaggaggaagagcagctgctgagagaggaacgggagaagagaaggcgccaggagctggagaggcaatatcgggaggaggaagagcttcagcgccagaaaaggaaacagcgataccgggatgaggatcagcgcagtgatctgaaatggcagtgggaaccagaaaaagaaaatgcagttcgtgataacaaggtttactgcaaaggcagagagaatgaacagttccggcagttggaagattcccaggtgcgcgacagacaatcccagcaagatctgcagcacctgctgggtgaacagcaagagagagatcgtgagcaagagaggaggcgctggcagcaggccaacaggcatttcccagaggaagaacagctggagcgagaagagcaaaaggaagccaaaaggcgcgacaggaagtcccaagaggaaaagcagttgctgagagaggaaagagaagagaagagacgccgtcaagagacagacagaaaattccgcgaggaggaacagctgctccaggaaagggaggaacagccgctgctccgccaagagcgtgacagaaaattccgcgaagaggaactgctccatcaggaacaagggagaaaattcctcgaggaggaacagcggctgcgcgaggaacgggagagaaaattccttaaggaggaacagcagctgcgcctcgaggagcgcgagcaactgcgtcaggaccgcgacagaaaattccgcgaggaggaacagcagctgagccgccaagagcgtgacagaaaattccgtgaagaggaacagcaggtgcgccgccaggaacgagagagaaaattcctggaggaggaacagcagctgcgccaggagcgtcacagaaaattccgcgaagaggaacagctgctccaggaaagggaagaacagcagctgcaccgccaagagcgtgacagaaaattcctggaggaggaacaacagctgcgccgccaagagcgtgacagaaaattccgcgaacaggaactgcgcagtcaggaaccagagagaaaattcctcgaggaggaacagcagctgcaccgccagcaacggcagagaaaattcctccaggaggaacagcagctgcgccgccaggagcgcgggcaacagcggcgtcaggaccgtgacagaaaattccgcgaggaggaacagctgcgccaggagagggaggaacagcagctgagccgccaagagcgtgacagaaaattccgtttagaggaacagaaagtgcgccgccaggaacaagagagaaaattcatggaggacgaacagcagctgcgccgccaggagggccaacaacagctgcgccaggaggacagaaaattccgcgaagacgaacagctgctccaggaaagggaagaacagcagctgcaccgccaagagcgtgacagaaaattcctcgaggaggaaccgcagctgcgccgccaggagcgcgaacaacagctgcgtcacgaccgcgacagaaaattccgtgaagaggaacagctgctccaggaaggggaggaacagcagctgcgccgccaagagcgtgacagaaaattccgcgaagaggaacagcagctccgccgtcaggaacgagagagaaaattcctccaggaggaacagcagctgcgccgccaggaactggagagaaaattccgtgaggaggaacagctgcgccaagaaacggagcaagagcagctgcgccgccaagaacgctacagaaaaatcctagaggaagagcagctccgtccggaaagggaagaacagcagctgcgccgccaggagcgcgacagaaaattccgcgaggaggaacagctccgccagggaagggaggaacagcagctgcgcagccaagagtctgacagaaaattccgcgaggaggaacagctacgccaggagagggaagaacagcagctccgcccccaacagcgtgacggaaagtatcgctgggaagaagagcagctccaacttgaggaacaagagcagaggctgcggcaggagcgagaccggcagtaccgggcggaggagcagtttgccacgcaggagaagagtcgtcgtgaggaacaagaactatggcaagaagaggagcagaaacgtcgccaggaacgggaaaggaaattacgggaagaacacatccgccgccagcagaaggaggaacagaggcaccgccaagtcggggagatacaatcccaagaagggaagggccatgggcggcttctggagcccggcactcatcagtttgccagtgtcccagtgcgctccagccctctctatgagtacatccaagagcagagatctcaataccgccct

SEQ ID NO: 126 - protein, 1898 aa, Homo sapiens
MSPLLRSICDITEIFNQYVSHDCDGAALTKKDLKNLLEREFGAVLRRPHDPKTVDLILELLDRDSNGRVDFNEFLLFIFKVAQACYYALGQATGLDEEKRARCDGKESLLQDRRTEEDQRRFEPRDRQLEEEPGQRRRQKRQEQERELAEGEEQSEKQERLEQRDRQRRDEELWRQRQEWQEREERRAEEEQLQSCKGHETEEFPDEEQLRRRELLELRRKGREEKQQQRRERQDRVFQEEEEKEWRKRETVLRKEEEKLQEEEPQRQRELQEEEEQLRKLERQELRRERQEEEQQQQRLRREQQLRRKQEEERREQQEERREQQERREQQEERREQQLRREQEERREQQLRREQEEERREQQLRREQEEERREQQLRREQEEERREQQLRREQQLRREQQLRREQQLRREQQLRREQQLRREQQLRREQQLRREQQLRREQQLRREQEEERHEQKHEQERREQRLKREQEERRDWLKREEETERHEQERRKQQLKRDQEEERRERWLKLEEEERREQQERREQQLRREQEERREQRLKRQEEEERLQQRLRSEQQLRREQEERLEQLLKREEEKRLEQERREQRLKREQEERRDQLLKREEERRQQRLKREQEERLEQRLKREEVERLEQEERRDERLKREEPEEERRHELLKSEEQEERRHEQLRREQQERREQRLKREEEEERLEQRLKREHEEERREQELAEEEQEQARERIKSRIPKWQWQLESEADARQSKVLLEAPQAGRAEAPQEQEEKRRRESELQWQEEERAHRQQQEEEQRRDFTWQWQAEEKSERGRQRLSARPPLREQRERQLRAEERQQREQRFLPEEEEKEQRGRQRREREKELQFLEEEEQLQRRERAQQLQEEEDGLQEDQERRRQEQRRDQKWRWQLEEERKRRRHTLYAKPALQEQLRKEQQLLQEEEEELQREEREKRRRQEQERQYREEEQLQQEEEQLLREEREKRRRQERERQYRKDKKLQQKEEQLLGEEPEKRRRQEREKKYREEEELQQEEEQLLREEREKRRRQEWERQYRKKDELQQEEEQLLREEREKRRLQERERQYREEEELQQEEEQLLGEERETRRRQELERQYRKEEELQQEEEQLLREEPEKRRRQERERQCREEEELQQEEEQLLREEREKRRRQELERQYREEEELQRQKRKQRYRDEDQRSDLKWQWEPEKENAVRDNKVYCKGRENEQFRQLEDSQVRDRQSQQDLQHLLGEQQERDREQERRRWQQANRHFPEEEQLEREEQKEAKRRDRKSQEEKQLLREEREEKRRRQETDRKFREEEQLLQEREEQPLLRQERDRKFREEELLHQEQGRKFLEEEQRLREERERKFLKEEQQLRLEEREQLRQDRDRKFREEEQQLSRQERDRKFREEEQQVRRQERERKFLEEEQQLRQERHRKFREEEQLLQEREEQQLHRQERDRKFLEEEQQLRRQERDRKFREQELRSQEPERKFLEEEQQLHRQQRQRKFLQEEQQLRRQERGQQRRQDRDRKFREEEQLRQEREEQQLSRQERDRKFRLEEQKVRRQEQERKFMEDEQQLRRQEGQQQLRQEDRKFREDEQLLQEREEQQLHRQERDRKFLEEEPQLRRQEREQQLRHDRDRKFREEEQLLQEGEEQQLRRQERDRKFREEEQQLRRQERERKFLQEEQQLRRQELERKFREEEQLRQETEQEQLRRQERYRKILEEEQLRPEREEQQLRRQERDRKFREEEQLRQGREEQQLRSQESDRKFREEEQLRQEREEQQLRPQQRDGKYRWEEEQLQLEEQEQRLRQERDRQYRAEEQFATQEKSRREEQELWQEEEQKRRQERERKLREEHIRRQQKEEQRHRQVGEIQSQEGKGHGRLLEPGTHQFASVPVRSSPLYEYIQEQRSQYRP

SEQ ID NO: 127 - DNA, 717 bp, Mus musculus
  CDS (1)..(717)
atgagttcttaccagcaaaagcagccctttgtcccacctcctcagcctgaacagcatcaagtgaagcaaccttgtcagcctccaccacaaggaaaatttgttcccatagccacctctgagccatgccacacagatgttccacaaccaggaaacaccaagattccagaaccatgcagcaccaaagtgcctgagccagggaacactgttgttcttgagccagattatactacgatgcctgggccatgttctacaaacatcactgagccagattataccacaattcctggaccatgctctaccaacatcacagagccagattatactacaattcctgggccatgctctaccaacatccctgggccagatcgtaccgtggttcctggatcatgctctaccaacatcacagagccagattataccacaattcctgggccatcctctaccaaaatccctgacccaggctgtgccatggttcctgggcccagtccttccagtacttctgagccaagctcagaaccatgctctatcaatgttcgtgaacctggctacatgaatgcctcagagcccacccatgccaaggttcctgatcagggctacaccaagatacctgaccagggatcctctaaggtaccagagccatgccagtccagggttcctgaggtgtgccccccaactgtcacccctgtatcagctaagcagaagaccaagcagaagtaa

SEQ ID NO: 128 - protein, 238 aa, Mus musculus
MSSYQQKQPFVPPPQPEQHQVKQPCQPPPQGKFVPIATSEPCHTDVPQPGNTKIPEPCSTKVPEPGNTVVLEPDYTTMPGPCSTNITEPDYTTIPGPCSTNITEPDYTTIPGPCSTNIPGPDRTVVPGSCSTNITEPDYTTIPGPSSTKIPDPGCAMVPGPSPSSTSEPSSEPCSINVREPGYMNASEPTHAKVPDQGYTKIPDQGSSKVPEPCQSRVPEVCPPTVTPVSAKQKTKQK

SEQ ID NO: 129 - DNA, 216 bp, Homo sapiens
  CDS (1)..(216)
atgtcttatcaacagcagcagtgcaagcagccctgccagccacctcctgtgtgccccacgccaaagtgcccagagccatgtccacccccgaagtgccctgagccctgcccaccaccaaagtgtccacagccctgcccacctcagcagtgccagcagaaatatcctcctgtgacaccttccccaccctgccagccaaagtatccaccgaagagcaag

SEQ ID NO: 130 - protein, 72 aa, Homo sapiens
MSYQQQQCKQPCQPPPVCPTPKCPEPCPPPKCPEPCPPPKCPQPCPPQQCQQKYPPVTPSPPCQPKYPPKSK

SEQ ID NO: 131 - DNA, 4797 bp, Mus musculus
  CDS (1)..(4797)
atgtctccacttataagaagcattgtcgatatcactgaagttttcaatcaatatgcatcacaaagttgtgatggagcatcacttagcaagaaagacctgaaaaacctccttgagagagaacttggagatgtccttcagagaccacatgaccctgagacgatagacctgaccctagaacttctggatcgcgactgcaacgggcgtgttgatttcaacgaattcctcctgttccttttcaagattgctcaagcttgctattatgctctcgatcaggccgcagagctaggcgagaagagagccctgcccaatgaaaagaggaacctgtcacaagatcgcaggcaagaagaccaaaggagattcgagccccgaagcagacaactggacgaagaacctgggcgccgaagctggcagaagagacgtgagcaggaggagcgcgctgaggagcagcggctggagcagcgctacaggcagcaccgcgatgaagagcagagactgcaaaggcgagaactgcaagaactggaggaacgccttgcagagaaagagccgcttggctggagtaagggtcgtgacgcggaggagttttctgaggtagaggaacagcaaaggcaagagaggcaggaactcaagggcaagggccaaacagaagagagaaggctgcagaagcgcaggcaagaagagctacgcgaacccctgctaaggcgcgatctggagttgaggcgcgaacaagagctaaggcgcgagcaggagttgaggcaggaacagaggcgcgagcaggagctaaggcgcgagcaggagctgaggcaagagctgaggcgcgagcaggagctgaatcgaaggcaggagctgaggcgcgaacaagagctaaggcgcgagcaggagctgaggcaggagctgaggcgcgagcaggagctaaggcgcgagcaggagttgaggcaggaactgaggcgcgagcaagagctaaggcgcgagcaggagttgaggcaggaactgaggcgcgagcaagagctaaggcgcgagcaggagttgaggcaggaactgaggcgtgagcaagagctaagacgcgagcaagagctgaggcaggagctggctgaggaggacgagctgacgcggatccgggaacccgacgagagcattacccagaggtggcagtggcagctcgaaaacgaggcagacgcccgtcagaacaaggtctactctaggcctagcaggcaggagcagaggcttcgccaggagctgggggagcgtcagctccgggagcaggaggagcagcgccgcgacctccaacaggagcgtcccgctgaggaggcgcgccagcgcaaccagtgggagaggccgcagcgggcggaggagcgcctggagcaggagcagcggttccgcgacagggaggagcagcgcttccgggaggagaagctgcaacgagcagagctccaggacagcctcctagatgaagaacagaggcgactccaggaggaacgccgagagccaaacaggagccggcaactgagggaagaaagccagaggcgccgcacactgtacgccaaacccagccagaggcagcgtagggaggaggagctacgcgaggaacggctgttgcaagaagagcagcgccagcagcgggagaggaaacaccgcagggaggaggatctgcagcaggaggaaaagcggctgcagcaagacgaagagcaactgcagcgagaaaggaggcgcctgcagcgggagaggcagtatcaggaggaggacctgcaacaggaggaagagcggctgcagcaggaggaagagcggctgcagagagaaagaaggcgcctgcagcaggaaaggcagtatcaggaggaggacctgcagcggctgcgggatgaagatcagcgcagggatctgaaatggcagtggcaaccaaggaaagaaaatgaagttcgtagtaacaggctcttcaccaaacgcagaggggatgaggaacccatccagcagctggaagattctcaggagcgagagagacgtcaggatcggcggcctctgcaagacgaagaggaagagaagagagagctggagcaggagaggaggcgtcgacagcagcgcgaccgtcagatcctagaggaagagcagtttcagcgagagcaccaacgggaagccagaagacgagatgagacgttccaggaggaagaacagctccagggagaatcgagaagacggcaacaggagagagagggcaagttccttgaggaggaaaggcagctgcggacagaacgggaagagcagaggcggcgtcaagaacaagagagagaattccaagaggaggaggagcacctccaagaacgcgagaaagaacttcggcaggaatgcgacagaaaatctcgtgaacaagagcgccgccagcagcgtgaggaagagcagctgaggcgtcaggagcgggaccagagattccgtcgggaacaagaacgccacctggaacgtgaggaagagcagctgcgggacagaccatcccgccgggaacaagaacgccaccaggaacgtgaggaagagcagctgcgggacagaccatcccgccgggaacaagaacgccaccaggaacgtgaggaagagcagctgcgggacagaccatcccgccgggaacaagaacgccaccaggaacgtgaggaagagcagctgcgggacagaccattccgccgggaacaagaacgccgcctggagcgtgaggaagagcagctgcgggacagaccatcccgccgggaacaagaacgccaccaggaacgtgaggaagagcagctgcgggacagaccatcccgccgggaacaagaacgccgcctggagcgtgaggaagagcagctgcgggacagatcattccgccgggagcaagagctcagacgggacagaaaattccatgaggaagaagagcgccgcgaggaactggaggaagagcagcgtggccaagagcgggaccgtttgagggtggaggagcagcttcgcggacagcgagaggaagagcagcgccgccgccaggaatgtgacagaaaattacaccgggaactagaggtccgccaggaactggaggaagagcggctgcgggacagaaagctccgcagggaacaagagctcaggcgcgacagaaaattccatgaggaagaagagcgccgtcatgaggagttcgaggaaaagcagctgcgcctccaggaaccggacagaagattccgccgggaacaagagctccgtcaggaatgcgtcgaggaagagcggctgcgggacagtaagatccgccgggagcaagagctccgccgggagcgcgaagaagagcggctgagggacagaaagatccgccgggaccaagaactccgccagggactggaggaagagcagctgaggcgccaggaacttgacagaaaattccgtgaggaacaagagctcgaccaagaactggaggaagagcggctgcgggacagaaagatccgccgggagcaagagctccgccgggagcaagagctccgccgggagcaagagttccgccgggagcaagagctccgccgggagcaagagttccgccgggagcaagagctccgccaggagcgcgaggaagagcggctgagggacagaaagatccgccgggaccaagaactccgccagggactggaggaagagcagctgaggcgccaggaacgtgacagaaaagtccgtgaggaacaagagctcgaccaagaactggaggaagagcggctgcgggacagaaagatccgccgggagcaagagctccgcagagagcaagagctccgccgggagcaagagttccgccgggagcaagggctccgccgggagcgcgaggaagagcggctgagggacagaaagatccgccgggaccaagaactccgccagggactggaggaagagcagctgaggcgccaggaacgtgacagaaaattccgtgaggaacaagagctcggccaagaactggaggaagagcggctgcgggacagaaagatccgccgggagcaagagctccgccgggaacgcgagcaagagcagcggcgccgcctggagcgtgaggaagagcagcagcgtctccatgagcgtgaggaagagcagcggcgccgccaggagcgcgagcaagagcagcagcggtgcctggagcgtgaggaggaacaatttcgctttgaggagcagcagcgccgccgccaggaacgcgagcaacagttgagacaggagcgcgacagaagagtccttgaggaagaagagcttcgtcaggaaagggaggagctgctgcaccgccaggtgggtggcaggaaattccgggaagaggagcgactccgcctggaaagagaggaacagcagcgtcgtctccaggagcgtgacaacagaagattccgcgaggaagtagagctcaggcaagaaagggaagggcagcagcttcgccaagagcgtgacagaaaattccgtgaggtagaagagcttcgccaggaagaacagcgccgccgccaggagcgtgacaggaaattccgggaagagaaacacccacgcgaggaacgcgaggaacagcagttgcgcagggagaagcgagatggtcaatacctggctgaggagcagtttgccagggatacgattcgtcgccaggaacaagaactacgtcaagaagaggaacaaagacgtcgccaagagcgggagagaaaattccaagaagagcaaatccgtcgtaggcaagaggagcagaggcgccgccaaatcctggagcctggtacacgccagtttgccaatgtcccagtgcgttccagccctctctatgagtacatccaggagcagaggtctcaataccgccct

SEQ ID NO: 132 - protein, 1599 aa, Mus musculus
MSPLIRSIVDITEVFNQYASQSCDGASLSKKDLKNLLERELGDVLQRPHDPETIDLTLELLDRDCNGRVDFNEFLLFLFKIAQACYYALDQAAELGEKRALPNEKRNLSQDRRQEDQRRFEPRSRQLDEEPGRRSWQKRREQEERAEEQRLEQRYRQHRDEEQRLQRRELQELEERLAEKEPLGWSKGRDAEEFSEVEEQQRQERQELKGKGQTEERRLQKRRQEELREPLLRRDLELRREQELRREQELRQEQRREQELRREQELRQELRREQELNRRQELRREQELRREQELRQELRREQELRREQELRQELRREQELRREQELRQELRREQELRREQELRQELRREQELRREQELRQELAEEDELTRIREPDESITQRWQWQLENEADARQNKVYSRPSRQEQRLRQELGERQLREQEEQRRDLQQERPAEEARQRNQWERPQRAEERLEQEQRFRDREEQRFREEKLQRAELQDSLLDEEQRRLQEERREPNRSRQLREESQRRRTLYAKPSQRQRREEELREERLLQEEQRQQRERKHRREEDLQQEEKRLQQDEEQLQRERRRLQRERQYQEEDLQQEEERLQQEEERLQRERRRLQQERQYQEEDLQRLRDEDQRRDLKWQWQPRKENEVRSNRLFTKRRGDEEPIQQLEDSQERERRQDRRPLQDEEEEKRELEQERRRRQQRDRQILEEEQFQREHQREARRRDETFQEEEQLQGESRRRQQEREGKFLEEERQLRTEREEQRRRQEQEREFQEEEEHLQEREKELRQECDRKSREQERRQQREEEQLRRQERDQRFRREQERHLEREEEQLRDRPSRREQERHQEREEEQLRDRPSRREQERHQEREEEQLRDRPSRREQERHQEREEEQLRDRPFRREQERRLEREEEQLRDRPSRREQERHQEREEEQLRDRPSRREQERRLEREEEQLRDRSFRREQELRRDRKFHEEEERREELEEEQRGQERDRLRVEEQLRGQREEEQRRRQECDRKLHRELEVRQELEEERLRDRKLRREQELRRDRKFHEEEERRHEEFEEKQLRLQEPDRRFRREQELRQECVEEERLRDSKIRREQELRREREEERLRDRKIRRDQELRQGLEEEQLRRQELDRKFREEQELDQELEEERLRDRKIRREQELRREQELRREQEFRREQELRREQEFRREQELRQEREEERLRDRKIRRDQELRQGLEEEQLRRQERDRKVREEQELDQELEEERLRDRKIRREQELRREQELRREQEFRREQGLRREREEERLRDRKIRRDQELRQGLEEEQLRRQERDRKFREEQELGQELEEERLRDRKIRREQELRREREQEQRRRLEREEEQQRLHEREEEQRRRQEREQEQQRCLEREEEQFRFEEQQRRRQEREQQLRQERDRRVLEEEELRQEREELLHRQVGGRKFREEERLRLEREEQQRRLQERDNRRFREEVELRQEREGQQLRQERDRKFREVEELRQEEQRRRQERDRKFREEKHPREEREEQQLRREKRDGQYLAEEQFARDTIRRQEQELRQEEEQRRRQERERKFQEEQIRRRQEEQRRRQILEPGTRQFANVPVRSSPLYEYIQEQRSQYRP

SEQ ID NO: 133 - DNA, 15270 bp, Homo sapiens
  CDS (1)..(15270)
atgagtggccacaccttgcctcctcttcccgtcccaggcaccaacagcacagagcaggccagtgtacccagagccatggcagccacgctgggagccggcacgccccccaggccccaggccaggagcatagctggggtgtatgtggaggcctcgggccaggcccagagtgtctacgccgccatggagcagggcctcctgcctgctgggctcgggcaggctctgctagaggcccaggcagccactgggggcctggtggacctcgcccggggccagctgctccctgtgtccaaggccctgcagcagggtctggtggggctggagctgaaggagaagctgctggccgctgagcgtgccactacgggctatcctgacccctacggcggtgagaagctggccctctttcaggccatcgggaaggaggttgtggacagggccctggggcagagctggctggaggtccaactggccactgggggcctggtggaccccgcccagggagtgctcgtggcccctgagccagcctgccaccagggcctcctggaccgggagacatggcacaagctgtcagagcttgagcctggcacaggtgacctgcgcttcctcaaccccaacacgctggagcggctgacataccaccagctgctggaaaggtgtgtgcgtgcccccgggtcggggctagccttgctgcccctcaagatcaccttccgctccatgggcggggcggtgagtgcagctgagctgctggaggtgggcatcctggacgagcaggctgtgcagggtctgcgggagggcaggctggccgcagtggacgtgagtgcacgtgccgaggtgcggcgctacctggagggtaccggcagcgtggccggggttgtcctgctgcccgaaggccacaagaagagctttttccaggctgccaccgagcacctgctcccaatgggcaccgcgctgccactcctagaggcccaggctgccacccacaccctggtggaccccatcacaggccagcggctgtgggtagacgaggcagtcagggcgggcctggtcagcccagagctccatgagcagctcctggtggctgagcaggccgtgacagggcaccacgaccccttcagtggctcccaaatcccccttttccaggccatgaagaaggggctagtggacaggccactagcactgcggctcttggatgcccagctggccacaggcgggctggtctgtccagcacgcaggctccggctgcccctggaggccgccctgcgctgcggctgcctggatgaagacactcagcggcagctctcgcaggctggcagcttctcagacggcacgcacggcggcctgcgctatgaacagctgctggccctctgtgtcaccgacccagagaccgggcttgccttcctgccactctcagggggaccccggggaggggagccccagggacccccattcatcaagtacagcactcggcaggccctgagcacggccacagccaccgtctctgtggggaagttccggggccggcccgtgtccctctgggagctgctcttctctgaggccatctcctcagagcagagggcgatgctggcccagcagtaccaggaagggaccctctccgtggagaagctggccgctgagctgagcgccacccttgagcaggctgcagccactgccagggtcaccttttctgggctgagggacaccgtgacaccaggagagctgctgaaagccgagatcatcgaccaggacctgtacgagcggttggagcatggacaggccacagccaaggatgtgggcagcctggcctcggcgcagaggtacctgcagggtacgggctgcattgctggcctgctgctccctggctcccaggaacgcctgagcatctatgaggcccgatgcaaggggctcctccggcccggcactgccctcatccttctggaggcacaagctgccacaggcttcatcatcgacccaaaagcaaacaaggggcactccgttgaggaggcactgagggctgctgtcattgggcctgatgtgttcgcgaagctgctgtcggctgagcgcgctgtcactggctacactgacccctacaccgggcagcagatctccctcttccaggccatgcagaagggcctcatcgtccgggagcacggcatccgcctgctggaggcccagatcgccacgggcggcgtcatcgaccccgtgcacagccaccgcgtgcccgtggacgtggcctaccggcgcggctacttcgatcagatgctgaacttgatcctgttggacccttctgacgacaccaagggcttcttcgaccccaacacgcacgagaacctcacgtacctgcagcttctggagcgctgtgtgcgtgaccccgagacgggcctgtacctcctgccactcagcagcacgcagtccccgctggtggacagtgccacccagcaggccttccagaacctgctgctctccgtgaagtatggacggtttcaggggcagagggtctccgcgtgggagctgatcaactctgagtacttcagcgagggccgcaggaggcagctgctgcgtcgctaccggcagcgcgaggtcacgctggggcaggtggcaaagctgctggaggcggagacgcagagacaggcggacatcatgctgcccgcactgcggagccgggtcaccgtccaccagctcctggaggccggtatcattgaccagcagctgttggaccaagtgctggccgggacaatcagcccggaggccctcctactcatggacggcgtccgcaggtacctgtgcggcctgggagctgtgggcggtgtgcggctgctgccctctggccagcggctcagcctctaccaggccatgaggcagaagctgctggggcccagggtggccctggccctgctggaggcccaggcggccaccggaaccatcatggaccctcacagcccagagagcctctcggtggatgaggccgtgcgcaggggtgtggtggggccggagctgtatggcaggctgaagcgggctgagggtgccattgctggcttcagagaccccttctctgggaagcaggtgtctgtgttccaggccatgaagaaaggtctcatcccttgggagcaagctgcccgcctcctggaggctcaagtggccacaggagggatcattgaccccaccagccaccaccacctccccatgccagtggccattcagcgtggctatgttgaccaggagatggagacagccttgtccagctcctccgagaccttccccacaccggacggccaggggcgcacgagctatgcccagctcctggaggagtgccccagggatgagacttctggccttcacctcctgcccctgccagaaagtgctcctgccctccccaccgaggagcaggtccagaggagcctgcaggccgtgccgggggccaaggatggcacatccctctgggacctgctcagctcctgccacttcaccgaggagcaacggaggggcctgctggaggacgtgcaggaggggaggaccactgtgccacagctgctagcctctgtgcagaggtgggtacaggagaccaagcttctggcccaggcccgcgtcatggtgcccggcccacggggtgaggtacccgctgtctggctgctggatgctggcatcatcacccaggagacccttgaggccctggctcagggcacgcagtcgcccgcccaggtcgccgagcagccggcggtgaaggcctgcctgtggggcacaggctgcgtggccggtgtgctgctacagccctctggggccaaggccagcatcgcccaggccgtgagggatggcctcctgcccacaggcctgggccagaggctgctggaagcccaggtggcatctggcttccttgttgaccccctgaacaaccagagactgtcagtggaggacgcggttaaggtcggcctggtgggcagggagctgagtgagcagctcgggcaggccgagagggcggcggccgggtacccagatccctactctagggcctccctctctctgtggcaggccatggagaaggggctcgtgccacagaacgagggcttgcccctcctgcaggtgcagctggccacagggggtgtggtggaccctgtccacggggtgcacctgccccaggcggcagcctgcagactcggccttctggacacacagacgagccaggtgctgactgcagttgacaaggacaacaagttcttctttgaccccagtgcgcgggaccaggtgacctaccagcagctcagggagcgctgcgtgtgcgactccgagaccggattgttgctgttgccactgccttcagacacagtgcttgaggtggacgaccacaccgcggtggctctgagggccatgaaggtgcccgtcagcacagggaggtttaaggggtgtagcgtgtcactctgggacctgctgctctccgaatacgttggcgctgacaagcggcgggagctggtggcactctgtcggtctgggagggctgcggccctgcggcaggtggtcagcgcagtcaccgccctggtcgaggctgcagagaggcagcccctgcaggccaccttcagagggctccggaagcaggtgtcagccagggacctgttcagggcgcagctgatcagcaggaagacgctggacgagctgagccaggggacaacgactgtgaaggaggtggcggagatggacagcgtgaagcggtccctggagggaggcaacttcattgccggggtccttatccagggcacccaggagaggatgagcatcccagaggccctgaggaggcacatcctgcggcctggcacagccctggtgctgctggaggcacaggcagctaccggcttcatcatcgaccccgcggagaaccggaagctgaccgtggaggaggcgttcaaagcaggaatgttcgggaaagaaacctacgtgaagctgctgtcggccgagcgcgccgtcaccggctacaccgacccctataccgggcagcagatctccctcttccaggccatgcagaaggacctcatcgtccgggagcacggcatccgcctgctggaggcccagatcgccacgggcggcatcatcgaccccgtgcacagccaccgcgtgcccgtggacgtggcctaccgctgcggctacttcgacgaggagatgaaccgcatcctggcggaccccagcgacgacaccaagggcttcttcgaccccaacacgcacgagaacctcacgtacctgcagcttctggagcgctgtgtggaggaccccgagacgggcctgtacctgctacaaatcataaagaaaggagaaaactacgtgtacatcaatgaggccacgagacacgtgttgcaatccagaactgcaaaaatgcgcgtggggaggtttgctgaccaggtggtctctttctgggacctgctgtcctctccatacttcacagaggacaggaagcgggagctcatccaggagtatggagcccagagtgggggcctggagaaattgctggaaatcatcaccacgacaattgaagaaacagagacgcaaaaccaaggcatcaaagtggcggccatcagaggggaggtgacagctgcagacctgttcaactccagggtcatcgatcagaagaccctgcacacacttcgtgtggggaggactgggggacaggcactcagcacgctggagtgtgtgaagccctatctggaaggcagcgactgcattgcgggggtcacggtgccctccaccagggaggtcatgagcctccatgaggccagcaggaaggagctcatccctgcagcatttgcgacttggctgctggaggcgcaggccgccaccgggttcctcctggacccctgcacccgccagaagctctctgtggatgaggctgtggatgtgggcctggtgaacgaggagctgcgggagaggctcctgaaggctgaaagagctgccacgggctacagggatccggccacaggagacacgatcccgctgttccaggccatgcagaagcagctcatcgagaaggcggaggcactgaggctgctggaggtgcaggtggccacggggggtgtcatcgacccacagcaccaccaccggctcccactggaaacagcctacagacggggctgtctgcacaaggacatctatgcgctcatttccgaccagaagcacatgaggaaacggtttgtggacccgaacacgcaagagaaggtctcgtaccgagagctgcaggagaggtgccgcccacaagaggacacgggctgggtgctgttcccagtgaacaaggctgcacgggactccgagcacatcgatgacgagacgagaagggccctggaggcagagcaagtggaaatcacagtgggaaggttcagaggccagaaaccaacactgtgggcactactgaattccgaatacgtgacagaggagaagaagctccagctggtgaggatgtatagaacacacaccagacgggcactgcagacggtagcgcagctcatcttagagttgatcgagaagcaggaaaccagcaacaaacacctgtggttccaaggaattagacgacagatcacagcttctgaactcctcagctcagccataatcacggaggaaatgctccaggacctggaaacgggacggagcacgacgcaagagctcatggaggacgaccgcgtcaagcgctacctggagggcaccagctgcatcgcgggcgtcctggtgcccgccaaggaccagcccggccgccaggagaagatgagcatctaccaggccatgtggaagggcgtgctgcggcccggcacggccctggtgctgctggaggcgcaggcggccaccggcttcgtcatcgaccccgtgcgcaacctgaggctgtcggtggaggagcccgtgcccgcgggcgtggtgggcagcgagatccaggagaagctgctgtcggccgagcgcgccgtcaccggctacaccgacccctacaccgggcagcagatctccctcttccaggccatgcagaaggacctcatcgtccgggagcacggcatccgcctgctggaggcccagatcgccacgggcggcgtcatcgaccccgtgcacagccaccgcgtgcccgtggacgtggcctaccggcgcggctacttcgacgaggagatgaaccgtgtcctggccgaccccagcgacgacaccaagggtttcttcgaccccaacacgcacgagaacctcacgtacgtgcagctgctgcgccgctgcgtgcccgacccggacaccgggctctacatgctgcagctggcaggccggggctccgccgtgcaccagctgagcgaggagctgcgctgtgccctgcgcgacgcccgcgtgacgccaggctcgggcgccctccagggccagagcgtctccgtctgggagctcctcttctaccgcgaggtgtccgaggaccggcgccaggacctgctgagcagataccgggcgggcacgctgaccgtggaggagctgggcgccaccctcacctcgctgctggcccaggcccaggcccaggcccgggccgaggccgaggccgggagcccgcgcccagacccccgggaggccctgcgtgcggccaccatggaggtcaaggtgggccgcctccgggggcgcgcggtgcccgtgtgggacgtgctggcgtccggctacgtgagcagggccgcccgggaggagctgctggccgagtttggctcggggaccctggacttgcccgcgctgacccgccggctgaccgccatcatcgaggaggccgaggaagcccccggggcccggccgcagctccaggacgccaggcgcggcccgcgggagccagggccagccgggcgaggggacggcgactcggggcgctcccagcgagagggccagggggagggcgagacccaggaggccgccgccgccgccgccgccgcccgccgccaggagcagaccctgcgtgatgccaccatggaggtgcagcgcgggcagttccaggggcggccggtctccgtgtgggacgtcctcttctcctcgtacctgagcgaggcccgccgagacgagctcctggcccagcacgcggccggcgccctgggcctgcccgacctcgtcgccgtcctcacccgggtcatcgaggagacggaggagcggctcagcaaggtgtccttccgcggcctgaggcgccaggtgtccgcctccgagctgcacacgtccgggatcctgggccccgagaccctgcgggacctggcccagggcactaagacgctgcaggaggtgacggagatggactcggtcaagcgctacctggagggcaccagctgcatcgcgggcgtcctggtgcccgccaaggaccagcccggccgccaggagaagatgagcatctaccaggccatgtggaagggcgtgctgcggcccggcacggccctggtgctgctggaggcgcaggcggccaccggcttcgtcatcgaccccgtgcgcaacctgaggctgtcggtggaggaggccgtggccgcgggcgtggtgggcggcgagatccaggagaagctgctgtcggccgagcgcgccgtcaccggctacaccgacccctacaccgggcagcagatctccctcttccaggccatgcagaaggacctcatcgtccgggagcacggcatccgcctgctggaggcccagatcgccacgggcggcgtcatcgaccccgtgcacagccaccgcgtgcccgtggacgtggcctaccggcgcggctacttcgacgaggagatgaaccgtgtcctggccgaccccagcgacgacaccaagggtttcttcgaccccaacacgcacgagaacctcacgtacgtgcagctgctgcgccgctgcgtgcccgacccggacaccgggctctacatgctgcagctggcaggccggggctccgccgtgcaccagctgagcgaggagctgcgctgtgccctgcgcgacgcccgcgtgacgccaggctcgggcgccctccagggccagagcgtctccgtctgggagctcctcttctaccgcgaggtgtccgaggaccggcgccaggacctgctgagcagataccgggcgggcacgctgaccgtggaggagctgggcgccaccctcacctcgctgctggcccaggcccaggcccaggcccgggccgaggccgaggccgggagcccgcgcccagacccccgggaggccctgcgtgcggccaccatggaggtcaaggtgggccgcctccgggggcgcgcggtgcccgtgtgggacgtgctggcgtccggctacgtgagcggggccgcccgggaggagctgctggccgagtttggctcggggaccctggacttgcccgcgctgacccgccggctgaccgccatcatcgaggaggccgaggaggcccccggggcccggccgcagctccaggacgcctggcgcggcccgcgggagccagggccagccgggcgaggggacggcgactcggggcgctcccagcgagagggccagggggagggcgagacccaggaggccgccgccgccgccgccgccgcccgccgccaggagcagaccctgcgtgatgccaccatggaggtgcagcgcgggcagttccaggggcggccggtctccgtgtgggacgtcctcttctcctcgtacctgagcgaggcccgccgagacgagctcctggcccagcacgcggccggcgccctgggcctgcccgacctcgtcgccgtcctcacccgggtcatcgaggagacggaggagcggctcagcaaggtgtccttccgcggcctgaggcgccaggtgtccgcctccgagctgcacacgtccgggatcctgggccccgagaccctgcgggacctggcccagggcactaagacgctgcaggaggtgacggagatggactcggtcaagcgctacctggagggcaccagctgcatcgcgggcgtcctggtgcccgccaaggaccagcccggccgccaggagaagatgagcatctaccaggccatgtggaagggcgtgctgcggcccggcacggccctggtgctgctggaggcgcaggcggccaccggcttcgtcatcgaccccgtgcgcaacctgaggctgtcggtggaggaggccgtggccgcgggcgtggtgggcggcgagatccaggagaagctgctgtcggccgagcgcgccgtcaccggctacaccgacccctacaccgggcagcagatctccctcttccaggccatgcagaaggacctcatcgtccgggagcacggcatccgcctgctggaggcccagatcgccacgggcggcgtcatcgaccccgtgcacagccaccgcgtgcccgtggacgtggcctaccggcgcggctacttcgacgaggagatgaaccgtgtcctggccgaccccagcgacgacaccaagggtttcttcgaccccaacacgcacgagaacctcacgtacgtgcagctgctgcgccgctgcgtgcccgacccggacaccgggctctacatgctgcagctggcaggccggggctccgccgtgcaccagctgagcgaggagctgcgctgtgccctgcgcgacgcccgcgtgacgccaggctcgggcgccctccagggccagagcgtctccgtctgggagctcctcttctaccgcgaggtgtccgaggaccggcgccaggacctgctgagcagataccgggcgggcacgctgaccgtggaggagctgggcgccaccctcacctcgctgctggcccaggcccaggcccaggcccgggccgaggccgaggccgggagcccgcgcccagacccccgggaggccctgcgtgcggccaccatggaggtcaaggtgggccgcctccgggggcgcgcggtgcccgtgtgggacgtgctggcgtccggctacgtgagcggggccgcccgggaggagctgctggccgagtttggctcggggaccctggacttgcccgcgctgacccgccggctgaccgccatcatcgaggaggccgaggaggcccccggggcccggccgcagctccaggacgcctggcgcggcccgcgggagccagggccagccgggcgaggggacggcgactcggggcgctcccagcgagagggccagggggagggcgagacccaggaggccgccgccgccgccgccgccgcccgccgccaggagcagaccctgcgtgatgccaccatggaggtgcagcgcgggcagttccaggggcggccggtctccgtgtgggacgtcctcttctcctcgtacctgagcgaggcccgccgagacgagctcctggcccagcacgcggccggcgccctgggcctgcccgacctcgtcgccgtcctcacccgggtcatcgaggagacggaggagcggctcagcaaggtgtccttccgcggcctgaggcgccaggtgtccgcctccgagctgcacacgtccgggatcctgggccccgagaccctgcgggacctggcccagggcactaagacgctgcaggaggtgacggagatggactcggtcaagcgctacctggagggcaccagctgcatcgcgggcgtcctggtgcccgccaaggaccagcccggccgccaggagaagatgagcatctaccaggccatgtggaagggcgtgctgcggcccggcacggccctggtgctgctggaggcgcaggcggccaccggcttcgtcatcgaccccgtgcgcaacctgaggctgtcggtggaggaggccgtggccgcgggcgtggtgggcggcgagatccaggagaagctgctgtcggccgagcgcgccgtcaccggctacaccgacccctacaccgggcagcagatctccctcttccaggccatgcagaaggacctcatcgtccgggagcacggcatccgcctgctggaggcccagatcgccacgggcggcgtcatcgaccccgtgcacagccaccgcgtgcccgtggacgtggcctaccggcgcggctacttcgacgaggagatgaaccgtgtcctggccgaccccagcgacgacaccaagggcttcttcgaccccaacacgcacgagaacctcacgtacgtgcagctgctgcgccgctgcgtgcccgacccggacaccgggctctacatgctgcagctggcaggccggggctccgccgtgcaccagctgagcgaggagctgcgctgtgccctgcgcgacgcccgcgtgacgccaggctcgggcgccctccagggccagagcgtctccgtctgggagctcctcttctaccgcgaggtgtccgaggaccggcgccaggacctgctgagcagataccgggcgagcacgctgaccgtggaggagctgggcgccaccctcacctcgctgctggcccaggcccaggcccaggcccgggccgaggccgaggccgggagcccgcgcccagacccccgggaggccctgcgtgcggccaccatggaggtcaaggtgggccgcctccgggggcgcgcggtgcccgtgtgggacgtgctggcgtccggctacgtgagcagggccgcccgggaggagctgctggccgagtttggctcggggaccctggacttgcccgcgctgacccgccggctgaccgccatcatcgaggaggccgaggaggcccccggggcccggccgcagctccaggacgcctggcgcggcccgcgggagccagggccagccgggcgaggggacggcgactcggggcgctcccagcgagagggccagggggagggcgagacccaggaggccgccgccgccaccgccgccgcccgccgccaggagcagaccctgcgtgatgccaccatggaggtgcagcgcgggcagttccaggggcggccggtctccgtgtgggacgtcctcttctcctcgtacctgagcgaggcccgccgagacgagctcctggcccagcacgcggccggcgccctgggcctgcccgacctcgtcgccgtcctcacccgggtcatcgaggagacggaggagcggctcagcaaggtgtccttccgcggcctgaggcgccaggtgtccgcctccgagctgcacacgtccgggatcctgggccccgagaccctgcgggacctggcccagggcactaagacgctgcaggaggtgacggagatggactcggtcaagcgctacctggagggcaccagctgcatcgcgggcgtcctggtgcccgccaaggaccagcccggccgccaggagaagatgagcatctaccaggccatgtggaagggcgtgctgcggcccggcacggccctggtgctgctggaggcgcaggcggccaccggcttcgtcatcgaccccgtgcgcaacctgaggctgtcggtggaggaggccgtggccgcgggcgtggtgggcggcgagatccaggagaagctgctgtcggccgagcgcgccgtcaccggctacaccgacccctacaccgggcagcagatctccctcttccaggccatgcagaaggacctcatcgtccgggagcacggcatccgcctgctggaggcccagatcgccacgggcggcgtcatcgaccccgtgcacagccaccgcgtgcccgtggacgtggcctaccggcgcggctacttcgacgaggagatgaaccgtgtcctggccgaccccagcgacgacaccaagggcttcttcgaccccaacacgcacgagaacctcacgtacgtgcagctgctgcgccgctgcgtgcccgacccggacaccgggctctacatgctgcagctggcaggccggggctccgccgtgcaccagctgagcgaggagctgcgctgtgccctgcgcgacgcccgcgtgacgccaggctcgggcgccctccagggccagagcgtctccgtctgggagctcctcttctaccgcgaggtgtccgaggaccggcgccaggacctgctgagcagataccgggcgggcacgctgaccgtggaggagctgggcgccaccctcacctcgctgctggcccaggcccaggcccaggcccgggccgaggccgaggccgggagcccgcgcccagacccccgggaggccctgcgtgcggccaccatggaggtcaaggtgggccgcctccgggggcgcgcggtgcccgtgtgggacgtgctggcgtccggctacgtgagcggggccgcccgggaggagctgctggccgagtttggctcggggaccctggacttgcccgcgctgacccgccggctgaccgccatcatcgaggaggccgaggaggcccccggggcccggccgcagctccaggacgcctggcgcggcccgcgggagccagggccagccgggcgaggggacggcgactcggggcgctcccagcgagagggccagggggagggcgagacccaggaggccgccgccgccgccgccgccgcccgccgccaggagcagaccctgcgtgatgccaccatggaggtgcagcgcgggcagttccaggggcggccggtctccgtgtgggacgtcctcttctcctcgtacctgagcgaggcccgccgagacgagctcctggcccagcacgcggccggcgccctgggcctgcccgacctcgtcgccgtcctcacccgggtcatcgaggagacggaggagcggctcagcaaggtgtccttccgcggcctgaggcgccaggtgtccgcctccgagctgcacacgtccgggatcctgggccccgagaccctgcgggacctggcccagggcactaagacgctgcaggaggtgacggagatggactcggtcaagcgctacctggagggcaccagctgcatcgcgggcgtcctggtgcccgccaaggaccagcccggccgccaggagaagatgagcatctaccaggccatgtggaagggcgtgctgcggcccggcacggccctggtgctgctggaggcgcaggcggccaccggcttcgtcatcgaccccgtgcgcaacctgaggctgtcggtggaggaggccgtggccgcgggcgtggtgggcggcgagatccaggagaagctgctgtcggccgagcgcgccgtcaccggctacaccgacccctacaccgggcagcagatctccctcttccaggccatgcagaaggacctcatcgtccgggagcacggcatccgcctgctggaggcccagatcgccacgggcggcgtcatcgaccccgtgcacagccaccgcgtgcccgtggacgtggcctaccggcgcggctacttcgacgaggagatgaaccgcgtcctggccgaccccagcgacgacaccaagggcttcttcgaccccaacacgcacgagaacctcacgtacctgcagcttctgcagagggccaccctggaccctgagacggggctcctatttctttctctctctctacag

SEQ ID NO: 134 - protein, 5090 aa, Homo sapiens
MSGHTLPPLPVPGTNSTEQASVPRAMAATLGAGTPPRPQARSIAGVYVEASGQAQSVYAAMEQGLLPAGLGQALLEAQAATGGLVDLARGQLLPVSKALQQGLVGLELKEKLLAAERATTGYPDPYGGEKLALFQAIGKEVVDRALGQSWLEVQLATGGLVDPAQGVLVAPEPACHQGLLDRETWHKLSELEPGTGDLRFLNPNTLERLTYHQLLERCVRAPGSGLALLPLKITFRSMGGAVSAAELLEVGILDEQAVQGLREGRLAAVDVSARAEVRRYLEGTGSVAGVVLLPEGHKKSFFQAATEHLLPMGTALPLLEAQAATHTLVDPITGQRLWVDEAVRAGLVSPELHEQLLVAEQAVTGHHDPFSGSQIPLFQAMKKGLVDRPLALRLLDAQLATGGLVCPARRLRLPLEAALRCGCLDEDTQRQLSQAGSFSDGTHGGLRYEQLLALCVTDPETGLAFLPLSGGPRGGEPQGPPFIKYSTRQALSTATATVSVGKFRGRPVSLWELLFSEAISSEQRAMLAQQYQEGTLSVEKLAAELSATLEQAAATARVTFSGLRDTVTPGELLKAEIIDQDLYERLEHGQATAKDVGSLASAQRYLQGTGCIAGLLLPGSQERLSIYEARCKGLLRPGTALILLEAQAATGFIIDPKANKGHSVEEALRAAVIGPDVFAKLLSAERAVTGYTDPYTGQQISLFQAMQKGLIVREHGIRLLEAQIATGGVIDPVHSHRVPVDVAYRRGYFDQMLNLILLDPSDDTKGFFDPNTHENLTYLQLLERCVRDPETGLYLLPLSSTQSPLVDSATQQAFQNLLLSVKYGRFQGQRVSAWELINSEYFSEGRRRQLLRRYRQREVTLGQVAKLLEAETQRQADIMLPALRSRVTVHQLLEAGIIDQQLLDQVLAGTISPEALLLMDGVRRYLCGLGAVGGVRLLPSGQRLSLYQAMRQKLLGPRVALALLEAQAATGTIMDPHSPESLSVDEAVRRGVVGPELYGRLKRAEGAIAGFRDPFSGKQVSVFQAMKKGLIPWEQAARLLEAQVATGGIIDPTSHHHLPMPVAIQRGYVDQEMETALSSSSETFPTPDGQGRTSYAQLLEECPRDETSGLHLLPLPESAPALPTEEQVQRSLQAVPGAKDGTSLWDLLSSCHFTEEQRRGLLEDVQEGRTTVPQLLASVQRWVQETKLLAQARVMVPGPRGEVPAVWLLDAGIITQETLEALAQGTQSPAQVAEQPAVKACLWGTGCVAGVLLQPSGAKASIAQAVRDGLLPTGLGQRLLEAQVASGFLVDPLNNQRLSVEDAVKVGLVGRELSEQLGQAERAAAGYPDPYSRASLSLWQAMEKGLVPQNEGLPLLQVQLATGGVVDPVHGVHLPQAAACRLGLLDTQTSQVLTAVDKDNKFFFDPSARDQVTYQQLRERCVCDSETGLLLLPLPSDTVLEVDDHTAVALRAMKVPVSTGRFKGCSVSLWDLLLSEYVGADKRRELVALCRSGRAAALRQVVSAVTALVEAAERQPLQATFRGLRKQVSARDLFRAQLISRKTLDELSQGTTTVKEVAEMDSVKRSLEGGNFIAGVLIQGTQERMSIPEALRRHILRPGTALVLLEAQAATGFIIDPAENRKLTVEEAFKAGMFGKETYVKLLSAERAVTGYTDPYTGQQISLFQAMQKDLIVREHGIRLLEAQIATGGIIDPVHSHRVPVDVAYRCGYFDEEMNRILADPSDDTKGFFDPNTHENLTYLQLLERCVEDPETGLYLLQIIKKGENYVYINEATRHVLQSRTAKMRVGRFADQVVSFWDLLSSPYFTEDRKRELIQEYGAQSGGLEKLLEIITTTIEETETQNQGIKVAAIRGEVTAADLFNSRVIDQKTLHTLRVGRTGGQALSTLECVKPYLEGSDCIAGVTVPSTREVMSLHEASRKELIPAAFATWLLEAQAATGFLLDPCTRQKLSVDEAVDVGLVNEELRERLLKAERAATGYRDPATGDTIPLFQAMQKQLIEKAEALRLLEVQVATGGVIDPQHHHRLPLETAYRRGCLHKDIYALISDQKHMRKRFVDPNTQEKVSYRELQERCRPQEDTGWVLFPVNKAARDSEHIDDETRRALEAEQVEITVGRFRGQKPTLWALLNSEYVTEEKKLQLVRMYRTHTRRALQTVAQLILELIEKQETSNKHLWFQGIRRQITASELLSSAIITEEMLQDLETGRSTTQELMEDDRVKRYLEGTSCIAGVLVPAKDQPGRQEKMSIYQAMWKGVLRPGTALVLLEAQAATGFVIDPVRNLRLSVEEPVPAGVVGSEIQEKLLSAERAVTGYTDPYTGQQISLFQAMQKDLIVREHGIRLLEAQIATGGVIDPVHSHRVPVDVAYRRGYFDEEMNRVLADPSDDTKGFFDPNTHENLTYVQLLRRCVPDPDTGLYMLQLAGRGSAVHQLSEELRCALRDARVTPGSGALQGQSVSVWELLFYREVSEDRRQDLLSRYRAGTLTVEELGATLTSLLAQAQAQARAEAEAGSPRPDPREALRAATMEVKVGRLRGRAVPVWDVLASGYVSRAAREELLAEFGSGTLDLPALTRRLTAIIEEAEEAPGARPQLQDARRGPREPGPAGRGDGDSGRSQREGQGEGETQEAAAAAAAARRQEQTLRDATMEVQRGQFQGRPVSVWDVLFSSYLSEARRDELLAQHAAGALGLPDLVAVLTRVIEETEERLSKVSFRGLRRQVSASELHTSGILGPETLRDLAQGTKTLQEVTEMDSVKRYLEGTSCIAGVLVPAKDQPGRQEKMSIYQAMWKGVLRPGTALVLLEAQAATGFVIDPVRNLRLSVEEAVAAGVVGGEIQEKLLSAERAVTGYTDPYTGQQISLFQAMQKDLIVREHGIRLLEAQIATGGVIDPVHSHRVPVDVAYRRGYFDEEMNRVLADPSDDTKGFFDPNTHENLTYVQLLRRCVPDPDTGLYMLQLAGRGSAVHQLSEELRCALRDARVTPGSGALQGQSVSVWELLFYREVSEDRRQDLLSRYRAGTLTVEELGATLTSLLAQAQAQARAEAEAGSPRPDPREALRAATMEVKVGRLRGRAVPVWDVLASGYVSGAAREELLAEFGSGTLDLPALTRRLTAIIEEAEEAPGARPQLQDAWRGPREPGPAGRGDGDSGRSQREGQGEGETQEAAAAAAAARRQEQTLRDATMEVQRGQFQGRPVSVWDVLFSSYLSEARRDELLAQHAAGALGLPDLVAVLTRVIEETEERLSKVSFRGLRRQVSASELHTSGILGPETLRDLAQGTKTLQEVTEMDSVKRYLEGTSCIAGVLVPAKDQPGRQEKMSIYQAMWKGVLRPGTALVLLEAQAATGFVIDPVRNLRLSVEEAVAAGVVGGEIQEKLLSAERAVTGYTDPYTGQQISLFQAMQKDLIVREHGIRLLEAQIATGGVIDPVHSHRVPVDVAYRRGYFDEEMNRVLADPSDDTKGFFDPNTHENLTYVQLLRRCVPDPDTGLYMLQLAGRGSAVHQLSEELRCALRDARVTPGSGALQGQSVSVWELLFYREVSEDRRQDLLSRYRAGTLTVEELGATLTSLLAQAQAQARAEAEAGSPRPDPREALRAATMEVKVGRLRGRAVPVWDVLASGYVSGAAREELLAEFGSGTLDLPALTRRLTAIIEEAEEAPGARPQLQDAWRGPREPGPAGRGDGDSGRSQREGQGEGETQEAAAAAAAARRQEQTLRDATMEVQRGQFQGRPVSVWDVLFSSYLSEARRDELLAQHAAGALGLPDLVAVLTRVIEETEERLSKVSFRGLRRQVSASELHTSGILGPETLRDLAQGTKTLQEVTEMDSVKRYLEGTSCIAGVLVPAKDQPGRQEKMSIYQAMWKGVLRPGTALVLLEAQAATGFVIDPVRNLRLSVEEAVAAGVVGGEIQEKLLSAERAVTGYTDPYTGQQISLFQAMQKDLIVREHGIRLLEAQIATGGVIDPVHSHRVPVDVAYRRGYFDEEMNRVLADPSDDTKGFFDPNTHENLTYVQLLRRCVPDPDTGLYMLQLAGRGSAVHQLSEELRCALRDARVTPGSGALQGQSVSVWELLFYREVSEDRRQDLLSRYRASTLTVEELGATLTSLLAQAQAQARAEAEAGSPRPDPREALRAATMEVKVGRLRGRAVPVWDVLASGYVSRAAREELLAEFGSGTLDLPALTRRLTAIIEEAEEAPGARPQLQDAWRGPREPGPAGRGDGDSGRSQREGQGEGETQEAAAATAAARRQEQTLRDATMEVQRGQFQGRPVSVWDVLFSSYLSEARRDELLAQHAAGALGLPDLVAVLTRVIEETEERLSKVSFRGLRRQVSASELHTSGILGPETLRDLAQGTKTLQEVTEMDSVKRYLEGTSCIAGVLVPAKDQPGRQEKMSIYQAMWKGVLRPGTALVLLEAQAATGFVIDPVRNLRLSVEEAVAAGVVGGEIQEKLLSAERAVTGYTDPYTGQQISLFQAMQKDLIVREHGIRLLEAQIATGGVIDPVHSHRVPVDVAYRRGYFDEEMNRVLADPSDDTKGFFDPNTHENLTYVQLLRRCVPDPDTGLYMLQLAGRGSAVHQLSEELRCALRDARVTPGSGALQGQSVSVWELLFYREVSEDRRQDLLSRYRAGTLTVEELGATLTSLLAQAQAQARAEAEAGSPRPDPREALRAATMEVKVGRLRGRAVPVWDVLASGYVSGAAREELLAEFGSGTLDLPALTRRLTAIIEEAEEAPGARPQLQDAWRGPREPGPAGRGDGDSGRSQREGQGEGETQEAAAAAAAARRQEQTLRDATMEVQRGQFQGRPVSVWDVLFSSYLSEARRDELLAQHAAGALGLPDLVAVLTRVIEETEERLSKVSFRGLRRQVSASELHTSGILGPETLRDLAQGTKTLQEVTEMDSVKRYLEGTSCIAGVLVPAKDQPGRQEKMSIYQAMWKGVLRPGTALVLLEAQAATGFVIDPVRNLRLSVEEAVAAGVVGGEIQEKLLSAERAVTGYTDPYTGQQISLFQAMQKDLIVREHGIRLLEAQIATGGVIDPVHSHRVPVDVAYRRGYFDEEMNRVLADPSDDTKGFFDPNTHENLTYLQLLQRATLDPETGLLFLSLSLQ

SEQ ID NO: 135 - DNA, 21627 bp, Mus musculus
  CDS (1134)..(20777)
  Misc_Feature (10276)..(10276): w at position 10276 is a or t
ggatgggcaggagaggtgtgccatctgctttggcctagcgacatgggatctctgagcagcaaaggggagaaccagccagaagatccacgaaaggttcctgtgctggactcctagtgtgccagcccctgaggtcatcaccctgaggctctggacctccaaccaaatgggcactaacagacccctgtctctgaaggtgagagctgggatgggcttcagagctaggtcctcctgatgctaggtcctcctgatgctaggttctcctgatgctgggtccttcagatggactgaggaacttatttgagccccaggggggtgggaaatgtcagggagctgaatggtgagatgaagcctggccaccccttgcagacagggctgccaattgtcaaagaccgcagagactccagctcctacaaggtcaaaacctcagagcagtccactgaggagctgtgaagactccaagatccagaagatagggacaggaaaccgtggcagagcatgctcagggactgagcaggagcttggagcacacagagtggggttgggtctctcaccaggctggcctcgaactcagaaatctgcctgcctctgtctcccaggtgctgggattaaaggcgtgcaccgccactgtcccggcatgtctctcactctcagcaataaagaggagtttggggaactgaaactctctttggtgggtcttcatttcccttgcaaacttcattcaaaagccacagagcccatgttgctctccactcccaacccagagcaggcccgcattctttttcaatgacttgtagtagggagggagggagggagggaggaaaggagggactttgcaactcaacagcctctcccagcttgagttgctcagaggtagccctgccccatgctttagtttgtgttcacctgcccactccacctgtcctgtggggtgcccaacctggctttcagccccgcctaccgccctcaatggggaagggacttgggtcaacatagggaggggccatgccgatttaaatgcttgtggcgcggggctcccggcgtggagggagcggagagacagaggaccgcgccagccttgtcacgacaggacacaagcagaccttaagcaagttctgtgccaccagctgtccacgatgaacggccaggcccctcctcatgatgtcgtagttgccaatggaactgagaagttcattgtccctaaaatcaagaagaaccaattgggagccagcactccttcaaggccccaagcagaagctgccctacctaccacagccagaagtattgctggggtatatgtggaggcctcggggcagacccagagcatctatgctgctataaagcagggcctcctgcccactgggcttggactgactttgcttgaggcccaggcagccactgggggcctcgtggaccttgcccagggccagcttcttcctgtgtctgaggccctaaggcggggtctagtgggattggagcttaaggagaaattactggctgctgaacgtgcagttactggctatcccgacccctatgggggtgaaaagctgtccctcttccaggccatcaagaaagaagttgtagacaggaccctggggtggagattgctagaggcccagctagctactgggggcctggtggacccaacccagggtgtgcaagtagccccagagctagcctgccagcagggccttttggataaggagacatggctcagcctggtggagtcagagcccagtatgggtacccctggtttttctgaccccaacacgctggagcagctgccatactctgtgctgttgggtaggtgtgtgcaagaccccagctcagggctgcccctattgcccttaaagaccactttccacaccctggctggagcagccagtgcgtcaatgctgctggaggcgggagtactaaatgaagagatggtccgagacctgcaggagggcatgctggtggtgtcagacgtgggcacacgtcccgaggtgcgacgttatctggaaggcactggagggttagcgggggttgtcctgttgcctggaggtcacaagaagagctttttccaggctacagttgaacacttggtctcaaagggtattgcactacaactcttagaggctcaggctgccacccgcacccttgtgcacccaaccacaggccagcgtctttgggtggaagaggcagtcaaggctggcctggttggcccagaacttcatgagcagctcctggttgcagaacaggcagtaactgggtattatgacccctttagcagctcccgaatccccgttttccaggctatgaagaagggacttgtggaccagccactggctctgcgtctcctagatgcccagctagctacaggtgggcttatatgcccagctcgcagattccggctgcccctggaggctgccctgcgctttggctgtctggacgaagagactcggcaacgtctctctcaggcaatgggcttttcagatcctaccacacacgatcgtcttggctatgaacagctgctggccctctctgttactgacccagagacagggcttgccttcctgcctctccctggaatgtcccacgcaaatgagccccagggacccacatttattgatcactgtactcgacaggccttgagcaaggctacaacctccatctctgtagggaggtaccagggcaggcctgtctccctctgggaactgctcttttctgagtcagtgcccgttaagaagagggcaatgcttgcccagcggcaccaggaaggggctctgtccgtggaggagctggcagctgagctgaagaacattgttgagcaggctgccgcaactgccaaagtcacctttgctgggttgagggacaccgtgacaccaggagagttgttgaaagctgagataatcaatcaggacctgtttgagcagttggaacgtggacagacctcagcccaagatgtgggcagcctggactccgtgcagaggtacctgcagggcacaggcagtattgcaggccttttgcttcctgactcccaggaacgactcagtatctatgaggcccgtagcaaggggctcctcaggcctggtactgccctgatcttgcttgaggcccaggctgccacaggctttatcattgacccaaaagagaacaagagatactctgtggaggaggcactgagggctggtgtcattgggcccgatgtatatgccaagttgctctctgcagaacatgccgtgactggctacacggacccctactctggggagcagatctccctcttccaggccatgcagagggacctcattgtgagagaccacggcattcgcctgctggaggcccagatcgccacaggtggtgtcattgaccccgtgcacagccaccgtgtgcccgtggacgtggcctaccaacgtggctactttgatcagattctgaactctatcctgctggacccttctgatgacaccaagggcttctttgaccccaacacgcatgaaaatctcacttacctgcagctcctggagcgctgtgtacatgactccgagacaggcctgcacctcctgcccctcagtagtacacgaccccagctggtggatagctccactcggcaggccttccagaagctactgctctccgtgaaatatggacggttccgggggcagagagtttctgcgtgggagctggttaactctgaatatttcacagaggaccggaggaggcagctcctgcaacgttatcggcagcgcaagatcacactggagcaggtcactcagctgctggagaaagagatgaggaggtggacagacatcacactgcctgccctacagggccaggtcactgcctaccagcttctagaggcccacatcatcaaccaggagctcctggaccaggtgctgacagggacgatcagcccagatgccctccttcaggtgggtgatgttcacaggtaccttcggggctcaggcactgtgggtggtgtgctgctaaagccctccaaccagcgaatcagtctctaccaggccatgaagcagaagctgctgccacctagtacagctttggccttgctggaggcccaggcagccactggaactatcactgacccctgcagtatggagaccctgtcagtagatgaggccgtgtgccggggagttgtgggagcagaagtatatggcaagttgaagcgagcagaacattctatcactggctacagagaccccttttctggaaaaaaggtgtccctgttcagggccatgaagaagggcctcgtccccgtggagcaggcgacccgcctactagaggcacaggtgtccacaggaggggtcgttgatcccacaacccacctccacctccccatgcctgtggcagtccagcgtggctgcattgatcgagagatggaggcggccttgtccagatctcctgagacctttcccacacccgatggccgggggcacaccagctatgcccagcttctggaacactgtctccaggacaaagcctctgggcttcacctcctgcccctgacagaagatgcccccaacgtccccactgacacacagatccaggagaccctgcaagcatcagctggcactgaagacggtttgtcgctctgggacttgctcacctcttgccactttaccgaggaacagcgccgcggctacctcgaggatgtgaaggttgggaagatttctgtgccacagctacagaacactgtgcgcagctgggtgcactcagcgaaactcctggcccgggcccgcatcactgtgccaggcccacggggcgaggtccctgccacttggctacgagatgctggtattatcacccaagagacgctggaagcactggcacagggcatgcagtctcccgatgaggtagccaaacagcctacggtgaaggtctgcctctggggtacgggctgtgtggccggggtgctgctccagccctcggggaccaagttgagcattgcccaggctgtaagagatggcctcctgcccacaggtctgggccagcagctgctggaggcccaggtggcatctggcttcctcgtcaatccgctaaccaaccagagattgtcagtggagggtgcagtgaaggctggcctggtgggcatggagcagagtgaacatctgaggcaggttgaaaaggctgtgacagggtactcagaccccttttcaggaggttccctttctctgtggcaggccatggagaaggggcttgtaacccaaagtgaggcctttcctctcctgcaagtccagctggccacagggggtgttgtggaccccgtccatggagtgcacctgccccaggaagtggcctacaagcttggtctcctggacgagcagacaagccgagtgctgaccgccactgggaaggaaaacaaactcttttttgaccccaactcccgtgagaaggtgacataccagcagctcagggaactctgtgtgctggatgccgacactggcttgtggctgctgcccctgccccagggcactgtgcttgaagtggatgaccatactgcggtggcactgagggctatgaaggtgcccatcaacatggggaggttccaagggcacagtgtgtcactctgggacctgctacactctgagtatgttggggctgagaagcggagggagctggtggcactttgttgttccgggagggctgccgctctgcgacaggtcatcggtatgctcaccaccctggtggaagctgcagagaagcagccctcgcaggccaccttcaaagggctccggaagcaggtttcagctggggacttgtttaggtcccagctgatcaccaagcagacactggatgagctcaatcaggggaagaggacggtccaggaagtgacagagatggatagtgtgaggaggtccctggaaggaggcaacttcattgctggggtccttattcaggatacaaaagagaagatgagtatcccagaggccttgagaaggcacattctgaggccaggcacagccctggtgctgctggaggcacaggcagccactggtttcatcattgaccccgtggaaaaccggaagctaactgtagagcaagcgttccaggcagggatgtttgggaaggaaacctacatgaagctgttatcagccgagcgggctgtcaccggctatacagacccttacacgggagaacagatctccctctttcaggccatgcagagggaccttattgtcagggaccatggcatccgtctactggaggcccagatcgccacaggtggtatcattgaccctgtgcacagccaccgtgtgcctgtggacgtggcctaccaacgtggctacttcaatgaggagatgaaccgcatcttgtctgacccaagcgatgacaccaagggcttctttgaccccaacacccatgagaacctcacttacctgcagctgctagagcgctgtgtggaggaccctgagactggcctgtatatgttggaaattgtaaagaaaggagaaacctacacatacattgatgaagccacaaggcaagctctgacatccagaactgtgaaaatgtatgtagggaagtttgcaggccagacggtgtctgtgtgggacctgttatcttcccagtattttaccgaaggaaggaggagaaagcttttgcgggagtacagagcccagaacataggcctggagaatctgctggaggtgattacctcgaccgtggaagaaacagagaagcaaagtcaaatattcaaggtgccgggtatccatggcgacgtgacagctgcagaactgttcaactccgggatccttaacaagaagaccctggatgcactccgcagtggggatagagggttccaggacctccgctggctggaggatgtacgtgtctacctggagggcagcaattacatcgctggagtgatagcacccctaacccagaaggtcatgagcttctacgaggccagcagggaagagctcatccccgcagggtttgcagctcagatgctggaggcacaggctgccactgggtacctaatggacccttgcaccaaccagaggctgtgtgtggatgaggccatagcagctgggctggtgggtgaagacctgagagagagacttgtgaatgcagagatggcagcaaagggctacaaagacccagccacaggggagactatcccactctaccaggccatggagaggaagttagtcggaagggaggaggcactgaggttgctggaggtgcaggtggccacgggtggggtcattgaccctcggcaccaccatcgggtccctctggatacagcctgccagcggggctgtatgtgtgacgacagccttgttctcattgctgaccaaaagcacatgaggaaaaggtttgtggatcccaacacacaagaaaaggtcacataccaggagctgcaggaccggtgccagcgggaagagaagtcaggctgggctctgttcccagtggtcaaggacaaaaaggacatagaatatgttgatgaggccaccaaaagggccctggaggcagaacaggtggaagtgactgtggggaggtacagaggccagaggcgatctgtgtgggaactgctgaactcagagtatgtgtctgaagagaagaagatggaactagttagactatacaaagaggacacaacccgggcactgcagaaggtggtagagctcatcctacaaatgattgcagacaaggaaaggagaagcaggcaactctggttccgaggattaagaactcaggtcacagctgaggaactgctgaggtcagaggtcatcacaaaacagactctggaggacctggaagaagggagaaccacagtagatcagattgaacgaaaggaagacgtgaagagatacctcaagggaaccagctgcatagcgggggtcctggtgcccgtccagggagagcctgggcgccaggagaagatgagcatctatcaggccatgtggaagggagtcctgaggccaggcacagccctggtgctgctggaggctcaggcagccacaggcttcatcatcgacccagtgaacaaccgcagactgtctgtggaggaggccgtggctgcaggcgtggtgggaggcgagatccaagagaagctgctgtctgctgagcgtgcggtcaccgggtacacggacccctacaccggggaccagatctccctcttccaggccatgcagagggacctcattgtgagagaccatggcattcgtttgttggaagcccagattgccacgggtggcgtcatcgatcctgtgcacagccaccgtgtgcccgtggacgtggcctaccagcgtggctactttgatgaagacatgaacagcattttggcggaccctggtgacgacaccaagggcttctttgaccccaacactcacgagaacctcacttacctacagctgctgcgccgctgtgtgcgcgacccagagactggcttctacatgctgcagctggctggaaagggctccagtgtgcaccacctgagcgaggagctgagacgggccctgcgtgaagcccgtgtgaccccaggcacgggcgacttccagggccagagcatctctgtctgggagcttctcttctaccgagaggtgcctgagagtctgcgccaggacctgctgcgttgctaccaggcaggtgggctcaccgttcatgacgtgaccaccacactcacctcactgctggcccgagccaaggatgggagcccacgtggggatccacaaggagccctgggcaaggccaccatggaagtaaaacggggtcatctccggggccacgaggtcccagtgtgggacattctgacatccaactatgtgagcagggacacccggaaggagctgctggcccagttcagctctgggtcgctgactctgcccatgctgaagaggagactgaccaccattattgaggaggctgaggagacacaggagtccaagccaaagccgagagacgcctctcttaagcaacaggacactggggccagaggctcagggacctccccagacgagggagatgctcaggacagctccgagagtgccaggcagcaacaggagcagactctgcgtgccaccaccatgcaggtacaccgtgggcagttccgggaccagcaagtttctgtgtggaaagtcctgttctcctcctacctgagtgagacccgccgggaggagctccttgcccagcacttggctggcaagctgggggtaatggaactcgtttccctcctcacccaaatcatcgaggagacagaagaacggctcagcaaggtgtctttccccggcctgaggcgacaggtgtccgcatctgagttgtgtacctctggcatcctggaccgggacaccatgcgagaactggcacagggcaccaagaccattcatgaggtgacagagatggactccgtcaagcgctacctggggggctccagctgcatagcgggcgtcctggtgcccgtccagggagagcctgggcgccaggagaagatgagcatctatcaggccatgtggaagggagtcctgaggccaggcacagccctggtgctgctggaggctcaggcagccacaggcttcatcatcgacccagtgaacaaccgcagactgtctgtggaggaggccgtggctgcaggcgtggtgggaggcgagatccaagagaagctgctgtctgctgagcgtgcggtcaccgggtacacggacccctacaccggggaccagatctccctcttccaggccatgcagagggacctcattgtgagagaccatggcattcgtttgttggaagcccagattgccacgggtggcgtcatcgaccctgtgcacagccaccgtgtgcccgtggacgtggcctaccagcgtggctactttgatgaagacatgaacagcattttggcggaccctggtgacgacaccaagggcttctttgaccccaacactcacgagaacctcacttacctacagctgctgcgccgctgtgtgcgcgacccagagactggcttctacatgctgcagctggctggaaagggctccagtgtgcaccacctgagcgaggagctgagacgggccctgcgtgaagcccgtgtgaccccaggcacgggcgacttccagggccagagcatctctgtctgggagcttctcttctaccgagaggtgcctgagagtctgcgccaggacctgctgcgtcgctaccaggcaggtgggctcaccgttcatgacgtgaccaccacactcacctcactgctggcccgagccaaggatgggagcccacgtgrggatccacaaggagccctgggcaaggccaccatggaagtaaaacggggtcatctccggggccacgwggtcccagtgtgggacattctgacatccaactatgtgagcagggacacccggaaggagctgctggcccagttcagctctgggtcgctgactctgcccatgctgaagaggagactgaccaccattattgaggaggctgaggagacacaggagtccaagccaaagccgagagacgcctctcttaagcaacaggacactggggccagaggctcagggacctccccagacgagggagatgctcaggacagctccgagagtgccaggcagcaacaggagcagactctgcgtgccaccaccatgcaggtacaccgtgggcagttccgggaccagcaagtttctgtgtggaaagtcctgttctcctcctacctgagtgagacccgccgggaggagctccttgcccagcacttggctggcaagctgggggtaatggaactcgtttccctcctcacccaaatcatcgaggagacagaagaacggctcagcaaggtgtctttccccggcctgaggcgacaggtgtccgcatctgagttgtgtacctctggcatcctggaccgggacaccatgcgagaactggcacagggcaccaagaccattcatgaggtgacagagatggactccgtcaagcgctacctggggggctccagctgcatagcgggcgtcctggtgcccgtccagggagagcctgggcgccaggagaagatgagcatctatcaggccatgtggaagggagtcctgaggccaggcacagccctggtgctgctggaggctcaggcagccacaggcttcatcatcgacccagtgaacaaccgcagactgtctgtggaggaggccgtggctgcaggcgtggtgggaggcgagatccaagagaagctgytgtctgctgagcgtgcggtcaccgggtacacggacccctacaccggggaccagatctccctcttccaggccatgcagagggacctcattgtgagagaccatggcattcgtttgttggaagcccagattgccacgggtggcgtcatcgaccctgtgcacagccaccgtgtgcccgtggacgtggcctaccagcgtggctactttgatgaagacatgaacagcattttggcggaccctggtgacgacaccaagggcttctttgaccccaacactcacgagaacctcacttacctacagctgctgcgccgctgtgtgcgcgacccagagactggcttctacatgctgcagctggctggaaagggctccagtgtgcaccacctgagcgaggagctgagacgggccctgcgtgaagcccgtgtgaccccaggcacgggcgacttccagggccagagcatctctgtctgggagcttctcttctaccgagaggtgcctgagagtctgcgccaggacctgctgcgtcgctaccaggcaggtgggctcaccgttcatgacgtgaccaccacactcacctcactgctggcccgagccaaggatgggagcccacgtgrggatccacaaggagccctgggcaaggccaccatggaagtaaaacggggtcatctccggggccacgwggtcccagtgtgggacattctgacatccaactatgtgagcagggacacccggaaggagctgctggcccagttcagctctgggtcgctgactctgcccatgctgaagaggagactgaccaccattattgaggaggctgaggagacacaggagtccaagccaaagccgagagacgcctctcttaagcaacaggacactggggccagaggctcagggacctccccagacgagggagatgctcaggacagctccgagagtgccaggcagcaacaggagcagactctgcgtgccaccaccatgcaggtacaccgtgggcagttccgggaccagcaagtttctgtgtggaaagtcctgttctcctcctacctgagtgagacccgccgggaggagctccttgcccagcacttggctggcaagctgggggtaatggaactcgtttccctcctcacccaaatcatcgaggagacagaagaacggctcagcaaggtgtctttccccggcctgaggcgacaggtgtccgcatctgagttgtgtacctctggcatcctggaccgggacaccatgcgagaactggcacagggcaccaagaccattcatgaggtgacagagatggactccgtcaagcgctacctggggggctccagctgcatagcgggcgtcctggtgcccgtccagggagagcctgggcgccaggagaagatgagcatctatcaggccatgtggaagggagtcctgaggccaggcacagccctggtgctgctggaggctcaggcagccacaggcttcatcatcgacccagtgaacaaccgcagactgtctgtggaggaggccgtggctgcaggcgtggtgggaggcgagatccaagagaagctgytgtctgctgagcgtgcggtcaccgggtacacggacccctacaccggggaccagatctccctcttccaggccatgcagagggacctcattgtgagagaccatggcattcgtttgttggaagcccagattgccacgggtggcgtcatcgaccctgtgcacagccaccgtgtgcccgtggacgtggcctaccagcgtggctactttgatgaagacatgaacagcattttggcggaccctggtgacgacaccaagggcttctttgaccccaacactcacgagaacctcacttacctacagctgctgcgccgctgtgtgcgcgacccagagactggcttctacatgctgcagctggctggaaagggctccagtgtgcaccacctgagcgaggagctgagacgggccctgcgtgaagcccgtgtgaccccaggcacgggcgacttccagggccagagcatctctgtctgggagcttctcttctaccgagaggtgcctgagagtctgcgccaggacctgctgcgtcgctaccaggcaggtgggctcaccgttcatgacgtgaccaccacactcacctcactgctggcccgagccaaggatgggagcccacgtgrggatccacaaggagccctgggcaaggccaccatggaagtaaaacggggtcatctccggggccacgwggtcccagtgtgggacattctgacatccaactatgtgagcagggacacccggaaggagctgctggcccagttcagctctgggtcgctgactctgcccatgctgaagaggagactgaccaccattattgaggaggctgaggagacacaggagtccaagccaaagccgagagacgcctctcttaagcaacaggacactggggccagaggctcagggacctccccagacgagggagatgctcaggacagctccgagagtgccaggcagcaacaggagcagactctgcgtgccaccaccatgcaggtacaccgtgggcagttccgggaccagcaagtttctgtgtggaaagtcctgttctcctcctacctgagtgagacccgccgggaggagctccttgcccagcacttggctggcaagctgggggtaatggaactcgtttccctcctcacccaaatcatcgaggagacagaagaacggctcagcaaggtgtctttccccggcctgaggcgacaggtgtccgcatctgagttgtgtacctctggcatcctggaccgggacaccatgcgagaactggcacagggcaccaagaccattcatgaggtgacagagatggactccgtcaagcgctacctggggggctccagctgcatagcgggcgtcctggtgcccgtccagggagagcctgggcgccaggagaagatgagcatctatcaggccatgtggaagggagtcctgaggccaggcacagccctggtgctgctggaggctcaggcagccacaggcttcatcatcgacccagtgaacaaccgcagactgtctgtggaggaggccgtggctgcaggcgtggtgggaggcgagatccaagagaagctgytgtctgctgagcgtgcggtcaccgggtacacggacccctacaccggggaccagatctccctcttccaggccatgcagagggacctcattgtgagagaccatggcattcgtttgttggaagcccagattgccacgggtggcgtcatcgaccctgtgcacagccaccgtgtgcccgtggacgtggcctaccagcgtggctactttgatgaagacatgaacagcattttggcggaccctggtgacgacaccaagggcttctttgaccccaacactcacgagaacctcacttacctacagctgctgcgccgctgtgtgcgcgacccagagactggcttctacatgctgcagctggctggaaagggctccagtgtgcaccacctgagcgaggagctgagacgggccctgcgtgaagcccgtgtgaccccaggcacgggcgacttccagggccagagcatctctgtctgggagcttctcttctaccgagaggtgcctgagagtctgcgccaggacctgctgcgtcgctaccaggcaggtgggctcaccgttcatgacgtgaccaccacactcacctcactgctggcccgagccaaggatgggagcccacgtgrggatccacaaggagccctgggcaaggccaccatggaagtaaaacggggtcatctccggggccacgwggtcccagtgtgggacattctgacatccaactatgtgagcagggacacccggaaggagctgctggcccagttcagctctgggtcgctgactctgcccatgctgaagaggagactgaccaccattattgaggaggctgaggagacacaggagtccaagccaaagccgagagacgcctctcttaagcaacaggacactggggccagaggctcagggacctccccagacgagggagatgctcaggacagctccgagagtgccaggcagcaacaggagcagactctgcgtgccaccaccatgcaggtacaccgtgggcagttccgggaccagcaagtttctgtgtggaaagtcctgttctcctcctacctgagtgagacccgccgggaggagctccttgcccagcacttggctggcaagctgggggtaatggaactcgtttccctcctcacccaaatcatcgaggagacagaagaacggctcagcaaggtgtctttccccggcctgaggcgacaggtgtccgcatctgagttgtgtacctctggcatcctggaccgggacaccatgcgagaactggcacagggcaccaagaccattcatgaggtgacagagatggactccgtcaagcgctacctggggggctccagctgcatagcgggcgtcctggtgcccgtccagggagagcctgggcgccaggagaagatgagcatctatcaggccatgtggaagggagtcctgaggccaggcacagccctggtgctgctggaggctcaggcagccacaggcttcatcatcgacccagtgaacaaccgcagactgtctgtggaggaggccgtggctgcaggcgtggtgggaggcgagatccaagagaagctgytgtctgctgagcgtgcggtcaccgggtacacggacccctacaccggggaccagatctccctcttccaggccatgcagagggacctcattgtgagagaccatggcattcgtttgttggaagcccagattgccacgggtggcgtcatcgaccctgtgcacagccaccgtgtgcccgtggacgtggcctaccagcgtggctactttgatgaagacatgaacagcattttggcggaccctggtgacgacaccaagggcttctttgaccccaacactcacgagaacctcacttacctacagctgctgcgccgctgtgtgcgcgacccagagactggcttctacatgctgcagctggctggaaagggctccagtgtgcaccacctgagcgaggagctgagacgggccctgcgtgaagcccgtgtgaccccaggcacgggcgacttccagggccagagcatctctgtctgggagcttctcttctaccgagaggtgcctgagagtctgcgccaggacctgctgcgtcgctaccaggcaggtgggctcaccgttcatgacgtgaccaccacactcacctcactgctggcccgagccaaggatgggagcccacgtgrggatccacaaggagccctgggcaaggccaccatggaagtaaaacggggtcatctccggggccacgwggtcccagtgtgggacattctgacatccaactatgtgagcagggacacccggaaggagctgctggcccagttcagctctgggtcgctgactctgcccatgctgaagaggagactgaccaccattattgaggaggctgaggagacacaggagtccaagccaaagccgagagacgcctctcttaagcaacaggacactggggccagaggctcagggacctccccagacgagggagatgctcaggacagctccgagagtgccaggcagcaacaggagcagactctgcgtgccaccaccatgcaggtacaccgtgggcagttccgggaccagcaagtttctgtgtggaaagtcctgttctcctcctacctgagtgagacccgccgggaggagctccttgcccagcacttggctggcaagctgggggtaatggaactcgtttccctcctcacccaaatcatcgaggagacagaagaacggctcagcaaggtgtctttccccggcctgaggcgacaggtgtccgcatctgagttgtgtacctctggcatcctggaccgggacaccatgcgagaactggcacagggcaccaagaccattcatgaggtgacagagatggactccgtcaagcgctacctggggggctccagctgcatagcgggcgtcctggtgcccgtccagggagagcctgggcgccaggagaagatgagcatctatcaggccatgtggaagggagtcctgaggccaggcacagccctggtgctgctggaggctcaggcagccacaggcttcatcatcgacccagtgaacaaccgcagactgtctgtggaggaggccgtggctgcaggcgtggtgggaggcgagatccaagagaagctgytgtctgctgagcgtgcggtcaccgggtacacggacccctacaccggggaccagatctccctcttccaggccatgcagagggacctcattgtgagagaccatggcattcgtttgttggaagcccagattgccacgggtggcgtcatcgaccctgtgcacagccaccgtgtgcccgtggacgtggcctaccagcgtggctactttgatgaagacatgaacagcattttggcggaccctggtgacgacaccaagggcttctttgaccccaacactcacgagaacctcacttacctacagctgctgcgccgctgtgtgcgcgacccagagactggcttctacatgctgcagctggctggaaagggctccagtgtgcaccacctgagcgaggagctgagacgggccctgcgtgaagcccgtgtgaccccaggcacgggcgacttccagggccagagcatctctgtctgggagcttctcttctaccgagaggtgcctgagagtctgcgccaggacctgctgcgtcgctaccaggcaggtgggctcaccgttcatgacgtgaccaccacactcacctcactgctggcccgagccaaggatgggagcccacgtgrggatccacaaggagccctgggcaaggccaccatggaagtaaaacggggtcatctccggggccacgwggtcccagtgtgggacattctgacatccaactatgtgagcagggacacccggaaggagctgctggcccagttcagctctgggtcgctgactctgcccatgctgaagaggagactgaccaccattattgaggaggctgaggagacacaggagtccaagccaaagccgagagacgcctctcttaagcaacaggacactggggccagaggctcagggacctccccagacgagggagatgctcaggacagctccgagagtgccaggcagcaacaggagcagactctgcgtgccaccaccatgcaggtacaccgtgggcagttccgggaccagcaagtttctgtgtggaaagtcctgttctcctcctacctgagtgagacccgccgggaggagctccttgcccagcacttggctggcaagctgggggtaatggaactcgtttccctcctcacccaaatcatcgaggagacagaagaacggctcagcaaggtgtctttccccggcctgaggcgacaggtgtccgcatctgagttgtgtacctctggcatcctggaccgggacaccatgcgagaactggcacagggcaccaagaccattcatgaggtgacagagatggactccgtcaagcgctacctggggggctccagctgcatagcgggcgtcctggtgcccgtccagggagagcctgggcgccaggagaagatgagcatctatcaggccatgtggaagggagtcctgaggccaggcacagccctggtgctgctggaggctcaggcagccacaggcttcatcatcgacccagtgaacaaccgcagactgtctgtggaggaggccgtggctgcaggcgtggtgggaggcgagatccaagagaagctgytgtctgctgagcgtgcggtcaccgggtacacggacccctacaccggggaccagatctccctcttccaggccatgcagagggacctcattgtgagagaccatggcattcgtttgttggaagcccagattgccacgggtggcgtcatcgaccctgtgcacagccaccgtgtgcccgtggacgtggcctaccagcgtggctactttgatgaagacatgaacagcattttggcggaccctggtgacgacaccaagggcttctttgaccccaacactcacgagaacctcacttacctacagctgctgcgccgctgtgtgcgcgacccagagactggcttctacatgctgcagctggctggaaagggctccagtgtgcaccacctgagcgaggagctgagacgggccctgcgtgaagcccgtgtgaccccaggcacgggcgacttccagggccagagcatctctgtctgggagcttctcttctaccgagaggtgcctgagagtctgcgccaggacctgctgcgtcgctaccaggcaggtgggctcaccgttcatgacgtgaccaccacactcacctcactgctggcccgagccaaggatgggagcccacgtgaggatccacaaggagccctgggcaaggccaccatggaagtaaaacggggtcatctccggggccacgtggtcccagtgtgggacattctgacatccaactatgtgagcagggacacccggaaggagctgctggcccagttcagctctgggtcgctgactctgcccatgctgaagaggagactgaccaccattattgaggaggctgaggagacacaggagtccaagccaaagccgagagacgcctctcttaagcaacaggacactggggccagaggctcagggacctccccagacgagggagatgctcaggacagctccgagagtgccaggcagcaacaggagcagactctgcgtgccaccaccatgcaggtacaccgtgggcagttccgggaccagcaagtttctgtgtggaaagtcctgttctcctcctacctgagtgagacccgccgggaggagctccttgcccagcacttggctggcaagctgggggtaatggaactcgtttccctcctcacccaaatcatcgaggagacagaagaacggctcagcaaggtgtctttccccggcctgaggcgacaggtgtccgcatctgagttgtgtacctctggcatcctggaccgggacaccatgcgagaactggcacagggcaccaagaccattcatgaggtgacagagatggactccgtcaagcgctacctggggggctccagctgcatagcgggcgtcctggtgcccgtccagggagagcctgggcgccaggagaagatgagcatctatcaggccatgtggaagggagtcctgaggccaggcacagccctggtgctgctggaggctcaggcagccacaggcttcatcatcgacccagtgaacaaccgcagactgtctgtggaggaggccgtggctgcaggcgtggtgggaggcgagatccaagagaagctgctgtctgctgagcgtgcggtcaccgggtacacggacccctacaccggggaccagatctccctcttccaggccatgcagagggacctcattgttaagaaccatggtattcgactgctggaagcccagattgccacaggtggcgtcatcgatcctgtgcacagccaccgtgtgcccgtggacgtggcctaccagcgtggctactttgatcaagagatgaacagcattttggcagaccctggtgacgacaccaagggcttctttgatcccaacactcatgagaacctcacttacctacagcttctgcagagagctacaattgaccctgagacgggattattgtttctctccctctctaagggctgattttctttttgtaaggttctgagactttatggaaggtacctctgcattctcataaaccctgactctgatccttaaattccctctctcctttcagctcctgtttttcagggtaggttatgttcttttccctttccctgcctgcttctgattggtaattttgtgtcctgtacctgttctcccgcttttctccttgtttttttttttttttcctcctctaaaattttcttatgttgattcttatgactgttttctgttcttgcaacatgaggtcagagggagccttttgtttttgttttgttggtttttttttgttttttgttttttttgttttttgttttttgttttttctgagacagggtttctctgctacagctttgattgtcctggtactcactctgttgaacagtctggtgtcattctcagagattcatctgcttcctcctctggaggactgggattaagggcatgtgccatcgctgctcagccaaggaagtggtctttgaattgagcacagcaatccttcaccttgtagtgtacaccagtctcagagtgaatggcaatcttttctattggtttcccaagcactgggattgcaagcataaagcaccatgcttggccaagatcttcaaagattttcaattcatggccactttgtacatggtgtgtcttgatttgccctctgtgttaggaataatgtcgctcatcttttctccatgtacctctgagacatcccacaggtcggtgtattacaactcagggtattacaacttttcgtgtcttcatgtcttttgataataaatgaattttccgctcttaaaaaaaaaaaaaaaaaaaaaaaaaaaaaaaa

SEQ ID NO: 136 - protein, 6548 aa, Mus musculus
  misc_feature (3026)..(3026): The 'Xaa' at location 3026 stands for Gly, or Glu.
  misc_feature (3048)..(3048): The 'Xaa' at location 3048 stands for Glu, or Val.
  misc_feature (3339)..(3339): The 'Xaa' at location 3339 stands for Leu.
  misc_feature (3541)..(3541): The 'Xaa' at location 3541 stands for Gly, or Glu.
  misc_feature (3563)..(3563): The 'Xaa' at location 3563 stands for Glu, or Val.
  misc_feature (3854)..(3854): The 'Xaa' at location 3854 stands for Leu.
  misc_feature (4056)..(4056): The 'Xaa' at location 4056 stands for Gly, or Glu.
  misc_feature (4078)..(4078): The 'Xaa' at location 4078 stands for Glu, or Val.
  misc_feature (4369)..(4369): The 'Xaa' at location 4369 stands for Leu.
  misc_feature (4571)..(4571): The 'Xaa' at location 4571 stands for Gly, or Glu.
  misc_feature (4593)..(4593): The 'Xaa' at location 4593 stands for Glu, or Val.
  misc_feature (4884)..(4884): The 'Xaa' at location 4884 stands for Leu.
  misc_feature (5086)..(5086): The 'Xaa' at location 5086 stands for Gly, or Glu.
  misc_feature (5108)..(5108): The 'Xaa' at location 5108 stands for Glu, or Val.
  misc_feature (5399)..(5399): The 'Xaa' at location 5399 stands for Leu.
  misc_feature (5601)..(5601): The 'Xaa' at location 5601 stands for Gly, or Glu.
  misc_feature (5623)..(5623): The 'Xaa' at location 5623 stands for Glu, or Val.
  misc_feature (5914)..(5914): The 'Xaa' at location 5914 stands for Leu.
MNGQAPPHDVVVANGTEKFIVPKIKKNQLGASTPSRPQAEAALPTTARSIAGVYVEASGQTQSIYAAIKQGLLPTGLGLTLLEAQAATGGLVDLAQGQLLPVSEALRRGLVGLELKEKLLAAERAVTGYPDPYGGEKLSLFQAIKKEVVDRTLGWRLLEAQLATGGLVDPTQGVQVAPELACQQGLLDKETWLSLVESEPSMGTPGFSDPNTLEQLPYSVLLGRCVQDPSSGLPLLPLKTTFHTLAGAASASMLLEAGVLNEEMVRDLQEGMLVVSDVGTRPEVRRYLEGTGGLAGVVLLPGGHKKSFFQATVEHLVSKGIALQLLEAQAATRTLVHPTTGQRLWVEEAVKAGLVGPELHEQLLVAEQAVTGYYDPFSSSRIPVFQAMKKGLVDQPLALRLLDAQLATGGLICPARRFRLPLEAALRFGCLDEETRQRLSQAMGFSDPTTHDRLGYEQLLALSVTDPETGLAFLPLPGMSHANEPQGPTFIDHCTRQALSKATTSISVGRYQGRPVSLWELLFSESVPVKKRAMLAQRHQEGALSVEELAAELKNIVEQAAATAKVTFAGLRDTVTPGELLKAEIINQDLFEQLERGQTSAQDVGSLDSVQRYLQGTGSIAGLLLPDSQERLSIYEARSKGLLRPGTALILLEAQAATGFIIDPKENKRYSVEEALRAGVIGPDVYAKLLSAEHAVTGYTDPYSGEQISLFQAMQRDLIVRDHGIRLLEAQIATGGVIDPVHSHRVPVDVAYQRGYFDQILNSILLDPSDDTKGFFDPNTHENLTYLQLLERCVHDSETGLHLLPLSSTRPQLVDSSTRQAFQKLLLSVKYGRFRGQRVSAWELVNSEYFTEDRRRQLLQRYRQRKITLEQVTQLLEKEMRRWTDITLPALQGQVTAYQLLEAHIINQELLDQVLTGTISPDALLQVGDVHRYLRGSGTVGGVLLKPSNQRISLYQAMKQKLLPPSTALALLEAQAATGTITDPCSMETLSVDEAVCRGVVGAEVYGKLKRAEHSITGYRDPFSGKKVSLFRAMKKGLVPVEQATRLLEAQVSTGGVVDPTTHLHLPMPVAVQRGCIDREMEAALSRSPETFPTPDGRGHTSYAQLLEHCLQDKASGLHLLPLTEDAPNVPTDTQIQETLQASAGTEDGLSLWDLLTSCHFTEEQRRGYLEDVKVGKISVPQLQNTVRSWVHSAKLLARARITVPGPRGEVPATWLRDAGIITQETLEALAQGMQSPDEVAKQPTVKVCLWGTGCVAGVLLQPSGTKLSIAQAVRDGLLPTGLGQQLLEAQVASGFLVNPLTNQRLSVEGAVKAGLVGMEQSEHLRQVEKAVTGYSDPFSGGSLSLWQAMEKGLVTQSEAFPLLQVQLATGGVVDPVHGVHLPQEVAYKLGLLDEQTSRVLTATGKENKLFFDPNSREKVTYQQLRELCVLDADTGLWLLPLPQGTVLEVDDHTAVALRAMKVPINMGRFQGHSVSLWDLLHSEYVGAEKRRELVALCCSGRAAALRQVIGMLTTLVEAAEKQPSQATFKGLRKQVSAGDLFRSQLITKQTLDELNQGKRTVQEVTEMDSVRRSLEGGNFIAGVLIQDTKEKMSIPEALRRHILRPGTALVLLEAQAATGFIIDPVENRKLTVEQAFQAGMFGKETYMKLLSAERAVTGYTDPYTGEQISLFQAMQRDLIVRDHGIRLLEAQIATGGIIDPVHSHRVPVDVAYQRGYFNEEMNRILSDPSDDTKGFFDPNTHENLTYLQLLERCVEDPETGLYMLEIVKKGETYTYIDEATRQALTSRTVKMYVGKFAGQTVSVWDLLSSQYFTEGRRRKLLREYRAQNIGLENLLEVITSTVEETEKQSQIFKVPGIHGDVTAAELFNSGILNKKTLDALRSGDRGFQDLRWLEDVRVYLEGSNYIAGVIAPLTQKVMSFYEASREELIPAGFAAQMLEAQAATGYLMDPCTNQRLCVDEAIAAGLVGEDLRERLVNAEMAAKGYKDPATGETIPLYQAMERKLVGREEALRLLEVQVATGGVIDPRHHHRVPLDTACQRGCMCDDSLVLIADQKHMRKRFVDPNTQEKVTYQELQDRCQREEKSGWALFPVVKDKKDIEYVDEATKRALEAEQVEVTVGRYRGQRRSVWELLNSEYVSEEKKMELVRLYKEDTTRALQKVVELILQMIADKERRSRQLWFRGLRTQVTAEELLRSEVITKQTLEDLEEGRTTVDQIERKEDVKRYLKGTSCIAGVLVPVQGEPGRQEKMSIYQAMWKGVLRPGTALVLLEAQAATGFIIDPVNNRRLSVEEAVAAGVVGGEIQEKLLSAERAVTGYTDPYTGDQISLFQAMQRDLIVRDHGIRLLEAQIATGGVIDPVHSHRVPVDVAYQRGYFDEDMNSILADPGDDTKGFFDPNTHENLTYLQLLRRCVRDPETGFYMLQLAGKGSSVHHLSEELRRALREARVTPGTGDFQGQSISVWELLFYREVPESLRQDLLRCYQAGGLTVHDVTTTLTSLLARAKDGSPRGDPQGALGKATMEVKRGHLRGHEVPVWDILTSNYVSRDTRKELLAQFSSGSLTLPMLKRRLTTIIEEAEETQESKPKPRDASLKQQDTGARGSGTSPDEGDAQDSSESARQQQEQTLRATTMQVHRGQFRDQQVSVWKVLFSSYLSETRREELLAQHLAGKLGVMELVSLLTQIIEETEERLSKVSFPGLRRQVSASELCTSGILDRDTMRELAQGTKTIHEVTEMDSVKRYLGGSSCIAGVLVPVQGEPGRQEKMSIYQAMWKGVLRPGTALVLLEAQAATGFIIDPVNNRRLSVEEAVAAGVVGGEIQEKLLSAERAVTGYTDPYTGDQISLFQAMQRDLIVRDHGIRLLEAQIATGGVIDPVHSHRVPVDVAYQRGYFDEDMNSILADPGDDTKGFFDPNTHENLTYLQLLRRCVRDPETGFYMLQLAGKGSSVHHLSEELRRALREARVTPGTGDFQGQSISVWELLFYREVPESLRQDLLRRYQAGGLTVHDVTTTLTSLLARAKDGSPRXDPQGALGKATMEVKRGHLRGHXVPVWDILTSNYVSRDTRKELLAQFSSGSLTLPMLKRRLTTIIEEAEETQESKPKPRDASLKQQDTGARGSGTSPDEGDAQDSSESARQQQEQTLRATTMQVHRGQFRDQQVSVWKVLFSSYLSETRREELLAQHLAGKLGVMELVSLLTQIIEETEERLSKVSFPGLRRQVSASELCTSGILDRDTMRELAQGTKTIHEVTEMDSVKRYLGGSSCIAGVLVPVQGEPGRQEKMSIYQAMWKGVLRPGTALVLLEAQAATGFIIDPVNNRRLSVEEAVAAGVVGGEIQEKLXSAERAVTGYTDPYTGDQISLFQAMQRDLIVRDHGIRLLEAQIATGGVIDPVHSHRVPVDVAYQRGYFDEDMNSILADPGDDTKGFFDPNTHENLTYLQLLRRCVRDPETGFYMLQLAGKGSSVHHLSEELRRALREARVTPGTGDFQGQSISVWELLFYREVPESLRQDLLRRYQAGGLTVHDVTTTLTSLLARAKDGSPRXDPQGALGKATMEVKRGHLRGHXVPVWDILTSNYVSRDTRKELLAQFSSGSLTLPMLKRRLTTIIEEAEETQESKPKPRDASLKQQDTGARGSGTSPDEGDAQDSSESARQQQEQTLRATTMQVHRGQFRDQQVSVWKVLFSSYLSETRREELLAQHLAGKLGVMELVSLLTQIIEETEERLSKVSFPGLRRQVSASELCTSGILDRDTMRELAQGTKTIHEVTEMDSVKRYLGGSSCIAGVLVPVQGEPGRQEKMSIYQAMWKGVLRPGTALVLLEAQAATGFIIDPVNNRRLSVEEAVAAGVVGGEIQEKLXSAERAVTGYTDPYTGDQISLFQAMQRDLIVRDHGIRLLEAQIATGGVIDPVHSHRVPVDVAYQRGYFDEDMNSILADPGDDTKGFFDPNTHENLTYLQLLRRCVRDPETGFYMLQLAGKGSSVHHLSEELRRALREARVTPGTGDFQGQSISVWELLFYREVPESLRQDLLRRYQAGGLTVHDVTTTLTSLLARAKDGSPRXDPQGALGKATMEVKRGHLRGHXVPVWDILTSNYVSRDTRKELLAQFSSGSLTLPMLKRRLTTIIEEAEETQESKPKPRDASLKQQDTGARGSGTSPDEGDAQDSSESARQQQEQTLRATTMQVHRGQFRDQQVSVWKVLFSSYLSETRREELLAQHLAGKLGVMELVSLLTQIIEETEERLSKVSFPGLRRQVSASELCTSGILDRDTMRELAQGTKTIHEVTEMDSVKRYLGGSSCIAGVLVPVQGEPGRQEKMSIYQAMWKGVLRPGTALVLLEAQAATGFIIDPVNNRRLSVEEAVAAGVVGGEIQEKLXSAERAVTGYTDPYTGDQISLFQAMQRDLIVRDHGIRLLEAQIATGGVIDPVHSHRVPVDVAYQRGYFDEDMNSILADPGDDTKGFFDPNTHENLTYLQLLRRCVRDPETGFYMLQLAGKGSSVHHLSEELRRALREARVTPGTGDFQGQSISVWELLFYREVPESLRQDLLRRYQAGGLTVHDVTTTLTSLLARAKDGSPRXDPQGALGKATMEVKRGHLRGHXVPVWDILTSNYVSRDTRKELLAQFSSGSLTLPMLKRRLTTIIEEAEETQESKPKPRDASLKQQDTGARGSGTSPDEGDAQDSSESARQQQEQTLRATTMQVHRGQFRDQQVSVWKVLFSSYLSETRREELLAQHLAGKLGVMELVSLLTQIIEETEERLSKVSFPGLRRQVSASELCTSGILDRDTMRELAQGTKTIHEVTEMDSVKRYLGGSSCIAGVLVPVQGEPGRQEKMSIYQAMWKGVLRPGTALVLLEAQAATGFIIDPVNNRRLSVEEAVAAGVVGGEIQEKLXSAERAVTGYTDPYTGDQISLFQAMQRDLIVRDHGIRLLEAQIATGGVIDPVHSHRVPVDVAYQRGYFDEDMNSILADPGDDTKGFFDPNTHENLTYLQLLRRCVRDPETGFYMLQLAGKGSSVHHLSEELRRALREARVTPGTGDFQGQSISVWELLFYREVPESLRQDLLRRYQAGGLTVHDVTTTLTSLLARAKDGSPRXDPQGALGKATMEVKRGHLRGHXVPVWDILTSNYVSRDTRKELLAQFSSGSLTLPMLKRRLTTIIEEAEETQESKPKPRDASLKQQDTGARGSGTSPDEGDAQDSSESARQQQEQTLRATTMQVHRGQFRDQQVSVWKVLFSSYLSETRREELLAQHLAGKLGVMELVSLLTQIIEETEERLSKVSFPGLRRQVSASELCTSGILDRDTMRELAQGTKTIHEVTEMDSVKRYLGGSSCIAGVLVPVQGEPGRQEKMSIYQAMWKGVLRPGTALVLLEAQAATGFIIDPVNNRRLSVEEAVAAGVVGGEIQEKLXSAERAVTGYTDPYTGDQISLFQAMQRDLIVRDHGIRLLEAQIATGGVIDPVHSHRVPVDVAYQRGYFDEDMNSILADPGDDTKGFFDPNTHENLTYLQLLRRCVRDPETGFYMLQLAGKGSSVHHLSEELRRALREARVTPGTGDFQGQSISVWELLFYREVPESLRQDLLRRYQAGGLTVHDVTTTLTSLLARAKDGSPRXDPQGALGKATMEVKRGHLRGHXVPVWDILTSNYVSRDTRKELLAQFSSGSLTLPMLKRRLTTIIEEAEETQESKPKPRDASLKQQDTGARGSGTSPDEGDAQDSSESARQQQEQTLRATTMQVHRGQFRDQQVSVWKVLFSSYLSETRREELLAQHLAGKLGVMELVSLLTQIIEETEERLSKVSFPGLRRQVSASELCTSGILDRDTMRELAQGTKTIHEVTEMDSVKRYLGGSSCIAGVLVPVQGEPGRQEKMSIYQAMWKGVLRPGTALVLLEAQAATGFIIDPVNNRRLSVEEAVAAGVVGGEIQEKLXSAERAVTGYTDPYTGDQISLFQAMQRDLIVRDHGIRLLEAQIATGGVIDPVHSHRVPVDVAYQRGYFDEDMNSILADPGDDTKGFFDPNTHENLTYLQLLRRCVRDPETGFYMLQLAGKGSSVHHLSEELRRALREARVTPGTGDFQGQSISVWELLFYREVPESLRQDLLRRYQAGGLTVHDVTTTLTSLLARAKDGSPREDPQGALGKATMEVKRGHLRGHVVPVWDILTSNYVSRDTRKELLAQFSSGSLTLPMLKRRLTTIIEEAEETQESKPKPRDASLKQQDTGARGSGTSPDEGDAQDSSESARQQQEQTLRATTMQVHRGQFRDQQVSVWKVLFSSYLSETRREELLAQHLAGKLGVMELVSLLTQIIEETEERLSKVSFPGLRRQVSASELCTSGILDRDTMRELAQGTKTIHEVTEMDSVKRYLGGSSCIAGVLVPVQGEPGRQEKMSIYQAMWKGVLRPGTALVLLEAQAATGFIIDPVNNRRLSVEEAVAAGVVGGEIQEKLLSAERAVTGYTDPYTGDQISLFQAMQRDLIVKNHGIRLLEAQIATGGVIDPVHSHRVPVDVAYQRGYFDQEMNSILADPGDDTKGFFDPNTHENLTYLQLLQRATIDPETGLLFLSLSKG

SEQ ID NO: 137 - DNA, 3519 bp, Mus musculus
  CDS (1)..(3519)
  Misc_Feature (620)..(620): y at position 620 is t or c
atgactggacagtgctgtgaggagttgcagagagccccgaagcccagggtggcactgagaaccaagaaaggattgaaagggtccattgaggatgtccttggagacctcctgggagatgacacaacaccacctgagaagcctgctgagccagcttcccatgccaaagacacagcgagctcacctcagtggcaggcttcaaaggcaaagttcctcccaaaagacagcgttgaaggactggcaggagctgatgctgaggcctccagcgtctcggatgcagacccacaggtcttcctgcagaacatgaaggacttggacagcatggacgatgatctctttggtcggataaagtctcaccagccctccggcaaaggagctgcaaagggtcctgggaaagaaggacctagcaatcacaagcctgctggcacattaacagctaatgagaaagggtacaccatgcccactaagaagccaccaccatcttccagcaagactgggcttcagtataagaagttctcctttgaagactttgaagacccactggcaggacttctctctgatgaggaagaagaaaccgccacgaagctgcctgcagtggagaggaaacctgctcccaagagccygggcgcagcagcaggccaaggtccttctgttcctctgacccctggggatacgcccatcaggaagaaagaactgctctttgatgaaggggatgacatcatgactactctgggctttgaagacagccccaaggcagagaggaagaagacaggagaccaggaagggccactccctgctcgctccaagctggatgaactgctgggtcggggtacagcagccaagctcctcactcgcccaggcactggggaacgcagagagttccagttagacaagaagtatcagaagatgggaggggaggagtctgtaccagctagagacaaggaagacagctgggatgacgagaccctcacctttggggcttacaagcctaccgtggcctcctctgagggccgccagtcccgcaggcagtcagtcagcaggttcttgggagaaggaggcccagaccctaagggagaaagcctaggcttcaaacagagctctccaccagcctccagtcctatccaccccaggaaaggaggagctgactggttaggccttaaggacaatgacctggacctgctgtctccctctcctgttcaaaaggcccaacaggaagactcacccatgacaccctctctcctgcctcctacaaaccagccctcagccccagagccacagtctgccccaactggacttccctcagcagcaaagccaccagccaagggtgcaagaccctctctcaaagccagccaggcctcctcaccaaaagcatctgaggagaaagaagatgactggttaagccatgtcatatctcagaagaaatcccaaaatctagccagagaagagcgtgcggggccccctaaggacctggcctcgctggggtcactgggtcagaccccttctggcagcctgcctgttgctcaggtccttgagcaggcccctgctggagaagcctcgaaaccaactacacaaggaatggcggctgtcaggcctggtgtcacagggtcctccatgagttggagccaagccactactgttctccctgtagatgaccccaagaaaggagcagcctctgcctctggggacttctctagcagagagcctgcggtttacattccacactcccaggaacctacggggctctctgtgcctatccagaccctcctcccagagtccatgatgcagagtctgctgccaggctcaggataccagaagcagctcctggccgcccaggggcagctgcagagtagcactgcccagcttcaggttgagctgctgcagagccagaccaagctgtcagagctggaggcccaggtgcgcaagttggagctggagcgggcccagcacaggatgctgctggagagtttgcagcagcgacaccaggcagacctggagctcatcgaggatgcacatagaagccgtatcaaggtgctagaaacatcctaccagcagcgggaggagcagctgcgcagagagaaggaggtgctatcagctcagcatgcgtcatattgccgagaagctgagcaggccagggctgagctcgtagcccagcaccagcggcagatggccatggctgaacaggagagggaccaggaggttgcccggctccgggagcttcagcaggcatccatcctggagatgcgcaaggatcatgagcaccagctgcagcggctgaagatgctgaaggaccaggagattgatgctgtcaccagcgctacctcccatactcggtccctgaatggcatcatcgagcagatggagaagttttccagcagcttgaacacgctgtcctcccgcgtggaggcctcgcaccttaccacctcacagcaacgagagctggggattcggcagcaagatgagcaattgcgagctctgcaggagcggctgggccgacagcagcgagacatggaggaagagcggaacaggctacaggaggtcatcgggaagatggaagtacgcctgagtgagcagagccggctcctggaacaggaacgttggcgggtggccgccgagaagactaaggcagagtcagcccagcgcactctggaggagcaaaggaagatcatggtccagcagattgccatggagagggaggagctggagagagccaagagcgccttgctggaggagcagaagtcagtcatgaataagtgtggggaggagcggcggcgcctggcagcagagtgggctgagtatttcacacagcagaagctgagtaaggaacgggcggagcgtgaggctgagagggcgatgcatgcagactcccagcgggagggcaccatcatcagcctgaccaaggagcaggcggagctgacagttagggcctgtgagctccgggccaaggaggagaagctgcttgctgagagggaggctttggagagagagcgccaagagctccggctggagaaggacaggttacacaaagccagcctgcgcctgcaggcccgtgcacaggaggtggaacacatgagtaaggtagcctccaagaaatacgaggagggggagcaggccttgcaggaggcgcagcagatgcagaatgagcagcagggccggctgcaggtggtccagcggcagcaggagtggctgcggcagcaggagcaacgtgtgcaccaggagcacctgagcctggcacagcagaggctgcagctggaccgcgtgcggcaggaagtgcctgctagccttccggggctgccccccagggttcagggcccggcagcctccagccgggatgctgtccaggcccccgcttccagcagtcctcagtgtagccagccagctgctgcccaggtgcccacacaccttcttgccaagctgctgctgctaaagcatacagcagaagaggaccacgacttcttggagaatgaacagttcttcctggagactctgaagaaagcaccctataatatggcgtaccattctgcc

SEQ ID NO: 138 - protein, 1173 aa, Mus musculus
  misc_feature (207)..(207): The 'Xaa' at location 207 stands for Pro, or Leu.
MTGQCCEELQRAPKPRVALRTKKGLKGSIEDVLGDLLGDDTTPPEKPAEPASHAKDTASSPQWQASKAKFLPKDSVEGLAGADAEASSVSDADPQVFLQNMKDLDSMDDDLFGRIKSHQPSGKGAAKGPGKEGPSNHKPAGTLTANEKGYTMPTKKPPPSSSKTGLQYKKFSFEDFEDPLAGLLSDEEEETATKLPAVERKPAPKSXGAAAGQGPSVPLTPGDTPIRKKELLFDEGDDIMTTLGFEDSPKAERKKTGDQEGPLPARSKLDELLGRGTAAKLLTRPGTGERREFQLDKKYQKMGGEESVPARDKEDSWDDETLTFGAYKPTVASSEGRQSRRQSVSRFLGEGGPDPKGESLGFKQSSPPASSPIHPRKGGADWLGLKDNDLDLLSPSPVQKAQQEDSPMTPSLLPPTNQPSAPEPQSAPTGLPSAAKPPAKGARPSLKASQASSPKASEEKEDDWLSHVISQKKSQNLAREERAGPPKDLASLGSLGQTPSGSLPVAQVLEQAPAGEASKPTTQGMAAVRPGVTGSSMSWSQATTVLPVDDPKKGAASASGDFSSREPAVYIPHSQEPTGLSVPIQTLLPESMMQSLLPGSGYQKQLLAAQGQLQSSTAQLQVELLQSQTKLSELEAQVRKLELERAQHRMLLESLQQRHQADLELIEDAHRSRIKVLETSYQQREEQLRREKEVLSAQHASYCREAEQARAELVAQHQRQMAMAEQERDQEVARLRELQQASILEMRKDHEHQLQRLKMLKDQEIDAVTSATSHTRSLNGIIEQMEKFSSSLNTLSSRVEASHLTTSQQRELGIRQQDEQLRALQERLGRQQRDMEEERNRLQEVIGKMEVRLSEQSRLLEQERWRVAAEKTKAESAQRTLEEQRKIMVQQIAMEREELERAKSALLEEQKSVMNKCGEERRRLAAEWAEYFTQQKLSKERAEREAERAMHADSQREGTIISLTKEQAELTVRACELRAKEEKLLAEREALERERQELRLEKDRLHKASLRLQARAQEVEHMSKVASKKYEEGEQALQEAQQMQNEQQGRLQVVQRQQEWLRQQEQRVHQEHLSLAQQRLQLDRVRQEVPASLPGLPPRVQGPAASSRDAVQAPASSSPQCSQPAAAQVPTHLLAKLLLLKHTAEEDHDFLENEQFFLETLKKAPYNMAYHSA

SEQ ID NO: 139 - DNA, 4683 bp, Streptococcus mutans
  CDS (1)..(4683)
atgaaagtcaaaaaaacttacggttttcgtaaaagtaaaattagtaaaacactgtgtggtgctgttctaggaacagtagcagcagtctctgtagcaggacaaaaggtttttgccgatgaaacgaccactactagtgatgtagatactaaagtagttggaacacaaactggaaatccagcgaccaatttgccagaggctcaaggaagtgcgagtaagcaagctgaacaaagtcaaaccaagctggagagacaaatggttcataccattgaagtacctaaaactgatcttgatcaagcagcaaaagatgctaagtctgctggtgtcaatgttgtccaagatgccgatgttaataaaggaactgttaaaacagctgaagaagcagtccaaaaagaaactgaaattaaagaagattacacaaaacaagctgaggatattaagaagacaacagatcaatataaatcggatgtagctgctcatgaggcagaagttgctaaaatcaaagctaaaaatcaggcaactaaagaacagtatggaaaagatatggtagctcataaagccgaggttgaacgcattaatgctgcaaatgctgccagtaaaacagcttatgaagctaaattggctcaatatcaagcagatttagcagccgttcaaaaaaccaatgctgccaatcaagcatcctatcaaaaagcccttgctgcttatcaggctgaactgaaacgtgttcaggaagctaatgcagccgccaaagccgcttatgatactgctgtagcagcaaataatgccaaaaatacagaaattgccgctgccaatgaagaaattagaaaacgcaatgcaacggccaaagctgaatatgagactaagttagctcaatatcaagctgaactaaagcgtgttcaggaagctaatgccgcaaacgaagcagactatcaagctaaattgaccgcctatcaaacagagcttgctcgcgttcagaaagccaatgcagatgctaaagcggcctatgaagcagctgtagcagcaaataatgccaaaaatgcggcacttacagctgaaaatactgcaattaagcaacgcaatgagaatgctaaggcgacttatgaagctgcactcaagcaatatgaggctgatttggcagcggtgaaaaaagctaatgccgcaaacgaagcagactatcaagctaaattgaccgcctatcaaacagagctcgctcgcgttcaaaaggccaatgcggatgctaaagcggcctatgaagcagctgtagcagcaaataatgccgcaaatgcagcgctcacagctgaaaatactgcaattaagaagcgcaatgcggatgctaaagctgattacgaagcaaaacttgctaagtatcaagcagatcttgccaaatatcaaaaagatttagcagactatccagttaagttaaaggcatacgaagatgaacaagcttctattaaagctgcactggcagaacttgaaaaacataaaaatgaagacggaaacttaacagaaccatctgctcaaaatttggtctatgatcttgagccaaatgcgaacttatctttgacaacagatgggaagttccttaaggcttctgctgtggatgatgcttttagcaaaagcacttcaaaagcaaaatatgaccaaaaaattcttcaattagatgatctagatatcactaacttagaacaatctaatgatgttgcttcttctatggagctttatggcaattttggtgataaagctggctggtcaacgacagtaagcaataactcacaggttaaatggggatcggtacttttagagcgcggtcaaagcgcaacagctacatacactaacctgcagaattcttattacaatggtaaaaagatttctaaaattgtctacaagtatacagtggaccctaagtccaagtttcaaggtcaaaaggtttggttaggtatttttaccgatccaactttaggtgtttttgcttccgcttatacaggtcaagttgaaaaaaacacttctatttttattaaaaatgaattcactttctatgacgaagatggaaaaccaattaattttgataatgcccttctatcagtagcttctcttaaccgagaaaataattctattgagatggccaaagattatacgggtaaatttgtcaaaatctctggatcatctatcggtgaaaagaatggcatgatttatgctacagatactctcaactttaggcagggtcaaggtggtgctcgttggaccatgtataccagagctagcgaaccgggatctggctgggatagttcagatgcgcctaactcttggtatggtgctggtgctatccgcatgtctggtcctaataacagtgtgactttgggtgctatctcatcaacacttgttgtgcctgctgatcctacaatggcaattgaaaccggcaaaaaaccaaatatttggtattcattaaatggtaaaatccgtgcggttaatcttcctaaagttactaaggaaaaacccacacctccggttaaaccaacagctccaactaaaccaacttatgaaacagaaaagccattaaaaccggcaccagtagctccaaattatgaaaaggagccaacaccaccgacaagaacaccggatcaagcagagccaaagaaacccactccgccgacctatgaaacagaaaagccgttggagccagcacctgttgagccaagctatgaagcagagccaacaccgccgacaaggacaccggatcaggcagagccaaataaacccacaccgccgacctatgaaacagaaaagccgttggagccagcacctgttgagccaagctatgaagcagagccaacgccaccgacaccaacaccagatcaaccagaaccaaacaaacctgttgagccaacttatgaggttattccaacaccgccgactgatcctgtttatcaagatcttccaacacctccatctataccaactgttcatttccattactttaaactagctgttcagccgcaggttaacaaagaaattagaaacaataacgatgttaatattgacagaactttggtggctaaacaatctgttgttaagttccagctgaagacagcagatctccctgctggacgtgatgaaacaacttcctttgtcttggtagatcccctgccatctggttatcaatttaatcctgaagctacaaaagctgccagccctggctttgatgtcgcttatgataatgcaactaatacagtcaccttcaaggcaactgcagcaactttggctacgtttaatgctgatttgactaagtcagtggcaacgatttatccaacagtggtcggacaagttcttaatgatggcgcaacttataagaataatttctcgctcacagtcaatgatgcttatggcattaaatccaatgttgttcgggtgacaactcctggtaaaccaaatgatccagataacccaaataataattacattaagccaactaaggttaataaaaatgaaaatggcgttgttattgatggtaaaacagttcttgccggttcaacgaattattatgagctaacttgggatttggatcaatataaaaacgaccgctcttcagcagataccattcaacaaggattttactatgtagatgattatccagaagaagcgcttgaattgcgtcaggatttagtgaagattacagatgctaatggcaatgaagttactggtgttagtgtggataattatactagtcttgaagcagcccctcaagaaattagagatgttctttctaaggcaggaattagacctaaaggtgctttccaaattttccgtgccgataatccaagagaattttatgatacttatgtcaaaactggaattgatttgaagattgtatcaccaatggttgttaaaaaacaaatgggacaaacaggcgggagttatgaagatcaagcttaccaaattgactttggtaatggttatgcatcaaatatcgttatcaataatgttcctaagattaaccctaagaaagatgtgaccttaacacttgatccggctgatacaaataatgttgatggtcagactattccacttaatacagtctttaattaccgtttgattggtggcattatccctgcaaatcactcagaagaactctttgaatacaatttctatgatgattatgatcaaacaggagatcactatactggtcagtataaagtttttgccaaggttgatatcactcttaaaaacggtgttattatcaagtcaggtactgagttaactcagtatacgacagcggaagttgataccactaaaggtgctatcacaattaagttcaaggaagcctttctgcgttctgtttcaattgattcagccttccaagctgaaagttatatccaaatgaaacgtattgcggttggtacttttgaaaatacctatattaatactgtcaatggggtaacttacagttcaaatacagtgaaaacaactactcctgaggatcctgcagaccctactgatccgcaagatccatcatcaccgcggacttcaactgtaattatctacaaacctcaatcaactgcttatcaaccaagctctgtccaaaaaacgttaccaaatacgggagtaacaaacaatgcttatatgcctttacttggtattattggcttagttactagttttagtttgcttggcttaaaggctaagaaagat

SEQ ID NO: 140 - protein, 1561 aa, Streptococcus mutans
MKVKKTYGFRKSKISKTLCGAVLGTVAAVSVAGQKVFADETTTTSDVDTKVVGTQTGNPATNLPEAQGSASKQAEQSQTKLERQMVHTIEVPKTDLDQAAKDAKSAGVNVVQDADVNKGTVKTAEEAVQKETEIKEDYTKQAEDIKKTTDQYKSDVAAHEAEVAKIKAKNQATKEQYGKDMVAHKAEVERINAANAASKTAYEAKLAQYQADLAAVQKTNAANQASYQKALAAYQAELKRVQEANAAAKAAYDTAVAANNAKNTEIAAANEEIRKRNATAKAEYETKLAQYQAELKRVQEANAANEADYQAKLTAYQTELARVQKANADAKAAYEAAVAANNAKNAALTAENTAIKQRNENAKATYEAALKQYEADLAAVKKANAANEADYQAKLTAYQTELARVQKANADAKAAYEAAVAANNAANAALTAENTAIKKRNADAKADYEAKLAKYQADLAKYQKDLADYPVKLKAYEDEQASIKAALAELEKHKNEDGNLTEPSAQNLVYDLEPNANLSLTTDGKFLKASAVDDAFSKSTSKAKYDQKILQLDDLDITNLEQSNDVASSMELYGNFGDKAGWSTTVSNNSQVKWGSVLLERGQSATATYTNLQNSYYNGKKISKIVYKYTVDPKSKFQGQKVWLGIFTDPTLGVFASAYTGQVEKNTSIFIKNEFTFYDEDGKPINFDNALLSVASLNRENNSIEMAKDYTGKFVKISGSSIGEKNGMIYATDTLNFRQGQGGARWTMYTRASEPGSGWDSSDAPNSWYGAGAIRMSGPNNSVTLGAISSTLVVPADPTMAIETGKKPNIWYSLNGKIRAVNLPKVTKEKPTPPVKPTAPTKPTYETEKPLKPAPVAPNYEKEPTPPTRTPDQAEPKKPTPPTYETEKPLEPAPVEPSYEAEPTPPTRTPDQAEPNKPTPPTYETEKPLEPAPVEPSYEAEPTPPTPTPDQPEPNKPVEPTYEVIPTPPTDPVYQDLPTPPSIPTVHFHYFKLAVQPQVNKEIRNNNDVNIDRTLVAKQSVVKFQLKTADLPAGRDETTSFVLVDPLPSGYQFNPEATKAASPGFDVAYDNATNTVTFKATAATLATFNADLTKSVATIYPTVVGQVLNDGATYKNNFSLTVNDAYGIKSNVVRVTTPGKPNDPDNPNNNYIKPTKVNKNENGVVIDGKTVLAGSTNYYELTWDLDQYKNDRSSADTIQQGFYYVDDYPEEALELRQDLVKITDANGNEVTGVSVDNYTSLEAAPQEIRDVLSKAGIRPKGAFQIFRADNPREFYDTYVKTGIDLKIVSPMVVKKQMGQTGGSYEDQAYQIDFGNGYASNIVINNVPKINPKKDVTLTLDPADTNNVDGQTIPLNTVFNYRLIGGIIPANHSEELFEYNFYDDYDQTGDHYTGQYKVFAKVDITLKNGVIIKSGTELTQYTTAEVDTTKGAITIKFKEAFLRSVSIDSAFQAESYIQMKRIAVGTFENTYINTVNGVTYSSNTVKTTTPEDPADPTDPQDPSSPRTSTVIIYKPQSTAYQPSSVQKTLPNTGVTNNAYMPLLGIIGLVTSFSLLGLKAKKD

SEQ ID NO: 141 - DNA, 23 bp, Artificial Sequence
  Description of Artificial Sequence: Primer
ggtcagttacgtgcagctgaagg

SEQ ID NO: 142 - DNA, 18 bp, Artificial Sequence
  Description of Artificial Sequence: Primer
gctgaggctgccggatcg

SEQ ID NO: 143 - DNA, 27 bp, Artificial Sequence
  Description of Artificial Sequence: Primer
cgcgcctcgagccacatactggtctgc

SEQ ID NO: 144 - DNA, 23 bp, Artificial Sequence
  Description of Artificial Sequence: Primer
gcttagctgaggctgccggatcg

SEQ ID NO: 145 - DNA, 948 bp, Homo sapiens
  CDS (16)..(933)
gctaaggaattcaccatgcatcaccatcaccatcacgagccacatactggtctgctcttgctttcagtacagaagagaagcatgtccttccaaggaatcagacaacctgtgaccgtcactgagctagtagattctggtatattgagaccgtccactgtcaatgaactggaatctggtcagatttcttatgacgaggttggtgagagaattaaggacttcctccagggttcaagctgcatagcaggcatatacaatgagaccacaaaacagaagcttggcatttatgaggccatgaaaattggcttagtccgacctggtactgctctggagttgctggaagcccaagcagctactggctttatagtggatcctgttagcaacttgaggttaccagtggaggaagcctacaagagaggtctggtgggcattgagttcaaagagaagctcctgtctgcagaacgagctgtcactgggtataatgatcctgaaacaggaaacatcatctctttgttccaagccatgaataaggaactcatcgaaaagggccacggtattcgcttattagaagcacagatcgcaaccggggggatcattgacccaaaggagagccatcgtttaccagttgacatagcatataagaggggctatttcaatgaggaactcagtgagattctctcagatccaagtgatgataccaaaggattttttgaccccaacactgaagaaaatcttacctatctgcaactaaaagaaagatgcattaaggatgaggaaacagggctctgtcttctgcctctgaaagaaaagaagaaacaggtgcagacatcacaaaagaataccctcaggaagcgtagagtggtcatagttgacccagaaaccaataaagaaatgtctgttcaggagggggtcgacctgcagccaagcttaattagctgagaattctccagc

SEQ ID NO: 146 - protein, 306 aa, Homo sapiens
MHHHHHHEPHTGLLLLSVQKRSMSFQGIRQPVTVTELVDSGILRPSTVNELESGQISYDEVGERIKDFLQGSSCIAGIYNETTKQKLGIYEAMKIGLVRPGTALELLEAQAATGFIVDPVSNLRLPVEEAYKRGLVGIEFKEKLLSAERAVTGYNDPETGNIISLFQAMNKELIEKGHGIRLLEAQIATGGIIDPKESHRLPVDIAYKRGYFNEELSEILSDPSDDTKGFFDPNTEENLTYLQLKERCIKDEETGLCLLPLKEKKKQVQTSQKNTLRKRRVVIVDPETNKEMSVQEGVDLQPSLIS

SEQ ID NO: 147 - DNA, 56 bp, Artificial Sequence
  Description of Artificial Sequence: Primer
gctaaggaattcaccatgcatcaccatcaccatcacgagccacatactggtctgct

SEQ ID NO: 148 - DNA, 35 bp, Artificial Sequence
  Description of Artificial Sequence: Primer
gctggagaattctcagctaattaagcttggctgca

SEQ ID NO: 149 - DNA, 942 bp, Homo sapiens
  CDS (1)..(927)
gctaaggaattccatcaccatcaccatcacgagccacatactggtctgctcttgctttcagtacagaagagaagcatgtccttccaaggaatcagacaacctgtgaccgtcactgagctagtagattctggtatattgagaccgtccactgtcaatgaactggaatctggtcagatttcttatgacgaggttggtgagagaattaaggacttcctccagggttcaagctgcatagcaggcatatacaatgagaccacaaaacagaagcttggcatttatgaggccatgaaaattggcttagtccgacctggtactgctctggagttgctggaagcccaagcagctactggctttatagtggatcctgttagcaacttgaggttaccagtggaggaagcctacaagagaggtctggtgggcattgagttcaaagagaagctcctgtctgcagaacgagctgtcactgggtataatgatcctgaaacaggaaacatcatctctttgttccaagccatgaataaggaactcatcgaaaagggccacggtattcgcttattagaagcacagatcgcaaccggggggatcattgacccaaaggagagccatcgtttaccagttgacatagcatataagaggggctatttcaatgaggaactcagtgagattctctcagatccaagtgatgataccaaaggattttttgaccccaacactgaagaaaatcttacctatctgcaactaaaagaaagatgcattaaggatgaggaaacagggctctgtcttctgcctctgaaagaaaagaagaaacaggtgcagacatcacaaaagaataccctcaggaagcgtagagtggtcatagttgacccagaaaccaataaagaaatgtctgttcaggagggggtcgacctgcagccaagcttaattagctgagaattctccagc

SEQ ID NO: 150 - protein, 309 aa, Homo sapiens
AKEFHHHHHHEPHTGLLLLSVQKRSMSFQGIRQPVTVTELVDSGILRPSTVNELESGQISYDEVGERIKDFLQGSSCIAGIYNETTKQKLGIYEAMKIGLVRPGTALELLEAQAATGFIVDPVSNLRLPVEEAYKRGLVGIEFKEKLLSAERAVTGYNDPETGNIISLFQAMNKELIEKGHGIRLLEAQIATGGIIDPKESHRLPVDIAYKRGYFNEELSEILSDPSDDTKGFFDPNTEENLTYLQLKERCIKDEETGLCLLPLKEKKKQVQTSQKNTLRKRRVVIVDPETNKEMSVQEGVDLQPSLIS

SEQ ID NO: 151 - DNA, 50 bp, Artificial Sequence
  Description of Artificial Sequence: Primer
gctaaggaattccatcaccatcaccatcacgagccacatactggtctgct

SEQ ID NO: 152 - DNA, 922 bp, Homo sapiens
  CDS (5)..(922)
caccatgcatcaccatcaccatcacgagccacatactggtctgctcttgctttcagtacagaagagaagcatgtccttccaaggaatcagacaacctgtgaccgtcactgagctagtagattctggtatattgagaccgtccactgtcaatgaactggaatctggtcagatttcttatgacgaggttggtgagagaattaaggacttcctccagggttcaagctgcatagcaggcatatacaatgagaccacaaaacagaagcttggcatttatgaggccatgaaaattggcttagtccgacctggtactgctctggagttgctggaagcccaagcagctactggctttatagtggatcctgttagcaacttgaggttaccagtggaggaagcctacaagagaggtctggtgggcattgagttcaaagagaagctcctgtctgcagaacgagctgtcactgggtataatgatcctgaaacaggaaacatcatctctttgttccaagccatgaataaggaactcatcgaaaagggccacggtattcgcttattagaagcacagatcgcaaccggggggatcattgacccaaaggagagccatcgtttaccagttgacatagcatataagaggggctatttcaatgaggaactcagtgagattctctcagatccaagtgatgataccaaaggattttttgaccccaacactgaagaaaatcttacctatctgcaactaaaagaaagatgcattaaggatgaggaaacagggctctgtcttctgcctctgaaagaaaagaagaaacaggtgcagacatcacaaaagaataccctcaggaagcgtagagtggtcatagttgacccagaaaccaataaagaaatgtctgttcaggagggggtcgacctgcagccaagcttaattagc

SEQ ID NO: 153 - protein, 306 aa, Homo sapiens; identical to SEQ ID NO: 146

SEQ ID NO: 154 - DNA, 45 bp, Artificial Sequence
  Description of Artificial Sequence: Primer
caccatgcatcaccatcaccatcacgagccacatactggtctgct

SEQ ID NO: 155 - DNA, 20 bp, Artificial Sequence
  Description of Artificial Sequence: Primer
gctaattaagcttggctgca

SEQ ID NO: 156 - protein, 283 aa, Homo sapiens
  PEPTIDE (1)..(283)
MRGSHHHHHHGSACELEPHTGLLLLSVQKRSMSFQGIRQPVTVTELVDSGILRPSTVNELESGQISYDEVGERIKDFLQGSSCIAGIYNETTKQKLGIYEAMKIGLVRPGTALELLEAQAATGFIVDPVSNLRLPVEEAYKRGLVGIEFKEKLLSAERAVTGYNDPETGNIISLFQAMNKELIEKGHGIRLLEAQIATGGIIDPKESHRLPVDIAYKRGYFNEELSEILSDPSDDTKGFFDPNTEENLTYLQLKERCIKDEETGLCLLPLKEKKKQVQTSQKN

SEQ ID NO: 157 - protein, 274 aa, Homo sapiens
  PEPTIDE (1)..(274)
MRGSHHHHHHGSACELEPHTGLLLLSVQKRSMSFQGIRQPVTVTELVDSGILRPSTVNELESGQISYDEVGERIKDFLQGSSCIAGIYNETTKQKLGIYEAMKIGLVRPGTALELLEAQAATGFIVDPVSNLRLPVEEAYKRGLVGIEFKEKLLSAERAVTGYNDPETGNIISLFQAMNKELIEKGHGIRLLEAQIATGGIIDPKESHRLPVDIAYKRGYFNEELSEILSDPSDDTKGFFDPNTEENLTYLQLKERCIKDEETGLCLLPLKEKK

SEQ ID NO: 158 - protein, 272 aa, Homo sapiens
  PEPTIDE (1)..(272)
MRGSHHHHHHGSACELEPHTGLLLLSVQKRSMSFQGIRQPVTVTELVDSGILRPSTVNELESGQISYDEVGERIKDFLQGSSCIAGIYNETTKQKLGIYEAMKIGLVRPGTALELLEAQAATGFIVDPVSNLRLPVEEAYKRGLVGIEFKEKLLSAERAVTGYNDPETGNIISLFQAMNKELIEKGHGIRLLEAQIATGGIIDPKESHRLPVDIAYKRGYFNEELSEILSDPSDDTKGFFDPNTEENLTYLQLKERCIKDEETGLCLLPLKE

SEQ ID NO: 159 - DNA, 948 bp, Homo sapiens
  CDS (1)..(945)
atgagaggatcgcatcaccatcaccatcacggatccgcatgcgagctcgagccacatactggtctgctcttgctttcagtacagaagagaagcatgtccttccaaggaatcagacaacctgtgaccgtcactgagctagtagattctggtatattgagaccgtccactgtcaatgaactggaatctggtcagatttcttatgacgaggttggtgagagaattaaggacttcctccagggttcaagctgcatagcaggcatatacaatgagaccacaaaacagaagcttggcatttatgaggccatgaaaattggcttagtccgacctggtactgctctggagttgctggaagcccaagcagctactggctttatagtggatcctgttagcaacttgaggttaccagtggaggaagcctacaagagaggtctggtgggcattgagttcaaagagaagctcctgtctgcagaacgagctgtcactgggtataatgatcctgaaacaggaaacatcatctctttgttccaagccatgaataaggaactcatcgaaaagggccacggtattcgcttattagaagcacagatcgcaaccggggggatcattgacccaaaggagagccatcgtttaccagttgacatagcatataagaggggctatttcaatgaggaactcagtgagattctctcagatccaagtgatgataccaaaggattttttgaccccaacactgaagaaaatcttacctatctgcaactaaaagaaagatgcattaaggatgaggaaacagggctctgtcttctgcctctgaaagaaaagaagaaacaggtgcagacatcacaaaagaataccctcaggaagcgtagagtggtcatagttgacccagaaaccaataaagaaatgtctgttcaggagggggtcgacctgcagccaagcttaattagctga

SEQ ID NO: 160 - protein, 315 aa, Homo sapiens
MRGSHHHHHHGSACELEPHTGLLLLSVQKRSMSFQGIRQPVTVTELVDSGILRPSTVNELESGQISYDEVGERIKDFLQGSSCIAGIYNETTKQKLGIYEAMKIGLVRPGTALELLEAQAATGFIVDPVSNLRLPVEEAYKRGLVGIEFKEKLLSAERAVTGYNDPETGNIISLFQAMNKELIEKGHGIRLLEAQIATGGIIDPKESHRLPVDIAYKRGYFNEELSEILSDPSDDTKGFFDPNTEENLTYLQLKERCIKDEETGLCLLPLKEKKKQVQTSQKNTLRKRRVVIVDPETNKEMSVQEGVDLQPSLIS

SEQ ID NO: 161 - DNA, 2099 bp, Homo sapiens
  CDS (135)..(1628)
gtgcaaacagggaggaaacagccggcgttgctgtagcgcgtctgggaattacaccgggggactggccggcccgcttcgtgcctgcgggaagtcgggccgggggactcttcggaaactccgagcctcagagaaatatggcgctcccgacgctgccgtcctactggtgcagccagcagcgcctgaatcagcagctagcacgacagcgagagcaggaggcccggcttcggcagcagtgggagcagaacagccgttacttcaggatgtctgacatctgcagctccaaacaggcagaatggagctctaaaacctcctaccagcggagcatgcatgcctatcagcgggagaagatgaaggaggagaagaggaggagtctggaggcccgacgggaaaagctcaggcagctcatgcaggaggagcaggacctgctggccagagaactggaggagctgaggctgagcatgaacttgcaggaaagaagaatccgggagcagcacgggaagctgaaatcagccaaagaagagcagaggaaactgattgctgaacaacttttgtacgaacactggaaaaagaacaacccgaaacttcgagagatggagctggaccttcaccagaagcatgtcgtaaactcttgggaaatgcagaaagaagaaaaaaaacagcaagaagccaccgcagagcaagagaacaaacggtatgaaaatgaatatgaaagggcccgaagggaggcgctagaaaggatgaaagctgaagaggagaggaggcagctggaggacaagctccaggccgaggcactgctgcaacagatggaggagctgaagctgaaggaggtggaggcgaccaaactaaagaaggagcaggagaatctgttgaagcagcggtgggagctagagaggctggaggaagagcgaaagcagatggaagccttccggcagaaggcagagctggggcgtttcttgagacatcagtataacgctcaactcagcagacgcacacagcagatccaagaggagctggaggcagacaggcggatcctgcaggccctcctcgagaaggaggacgagagccagcgcctccacctggccaggcgggagcaggtcatggccgatgtggcctggatgaagcaggccattgaggagcagctgcagctggagcgggcgcgggaggcagagctgcagatgctgctgagggaggaggccaaggagatgtgggaaaagagagaggcagagtgggcccgagagcgcagcgcacgggacagactgatgagcgaggttctgacagggagacaacagcaaatacaagagaagattgagcagaaccgacgggcacaagaggaatccctgaaacacagggagcaacttattcgaaatcttgaggaggtgagagagttggctcgtcgcgagaaagaggagagtgaaaagctgaaatcggccaggaagcaggagctggaagcccaggttgcagagcgccggctgcaggcatgggaagcagaccagcaggaggaggaggaagaggaggaggcccggcgggtcgagcagctctcagatgccctgctgcagcaggaggcggagactatggctgagcagggctaccggcctaagccttacggacatccaaaaattgcttggaactgacttcatgggtaccataagtacagagaacaagggatgctgaggcttctgatcccagccgccaggcagttttacagggctctgttaacagtaagtgcccggggcactgtcagatggctcagcagtgcctgctcaggttcatcattgaaacatcccagtgtttggccagacattaaggtgtcgtgagagtccctttcatgcctttcttacccaagcaagggtctttgatgggcacgtgtttacagcgctgctgcatagtcttgtaatatattaacagtcacatcaactgaaggtcaatactaagagccacaggttgtacctgtgatggggcgtgtggtttcctgttgtctcacctttaattgtcaacctccagtgttgactctagaaatatgaggaaagcttttcagtttttaaaattgccatttaaatttagtctattaaaaacaaacctagaaaaaaaaaaaaaaaaaa

SEQ ID NO: 162 - protein, 498 aa, Homo sapiens
MALPTLPSYWCSQQRLNQQLARQREQEARLRQQWEQNSRYFRMSDICSSKQAEWSSKTSYQRSMHAYQREKMKEEKRRSLEARREKLRQLMQEEQDLLARELEELRLSMNLQERRIREQHGKLKSAKEEQRKLIAEQLLYEHWKKNNPKLREMELDLHQKHVVNSWEMQKEEKKQQEATAEQENKRYENEYERARREALERMKAEEERRQLEDKLQAEALLQQMEELKLKEVEATKLKKEQENLLKQRWELERLEEERKQMEAFRQKAELGRFLRHQYNAQLSRRTQQIQEELEADRRILQALLEKEDESQRLHLARREQVMADVAWMKQAIEEQLQLERAREAELQMLLREEAKEMWEKREAEWARERSARDRLMSEVLTGRQQQIQEKIEQNRRAQEESLKHREQLIRNLEEVRELARREKEESEKLKSARKQELEAQVAERRLQAWEADQQEEEEEEEARRVEQLSDALLQQEAETMAEQGYRPKPYGHPKIAWN

SEQ ID NO: 163 - DNA, 8616 bp, Homo sapiens
  CDS (1)..(8613)
atgagctgcaacggaggctcccacccgcggatcaacactctgggccgcatgatccgcgccgagtctggcccggacctgcgctacgaggtgaccagcggcggcgggggcaccagcaggatgtactattctcggcgcggcgtgatcaccgaccagaactcggacggctactgtcaaaccggcacgatgtccaggcaccagaaccagaacaccatccaggagctgctgcagaactgctccgactgcttgatgcgagcagagctcatcgtgcagcctgaattgaagtatggagatggaatacaactgactcggagtcgagaattggatgagtgttttgcccaggccaatgaccaaatggaaatcctcgacagcttgatcagagagatgcggcagatgggccagccctgtgatgcttaccagaaaaggcttcttcagctccaagagcaaatgcgagccctttataaagccatcagtgtccctcgagtccgcagggccagctccaagggtggtggaggctacacttgtcagagtggctctggctgggatgagttcaccaaacatgtcaccagtgaatgtttggggtggatgaggcagcaaagggcggagatggacatggtggcctggggtgtggacctggcctcagtggagcagcacattaacagccaccggggcatccacaactccatcggcgactatcgctggcagctggacaaaatcaaagccgacctgcgcgagaaatctgcgatctaccagttggaggaggagtatgaaaacctgctgaaagcgtcctttgagaggatggatcacctgcgacagctgcagaacatcattcaggccacgtccagggagatcatgtggatcaatgactgcgaggaggaggagctgctgtacgactggagcgacaagaacaccaacatcgctcagaaacaggaggccttctccatacgcatgagtcaactggaagttaaagaaaaagagctcaataagctgaaacaagaaagtgaccaacttgtcctcaatcagcatccagcttcagacaaaattgaggcctatatggacactctgcagacgcagtggagttggattcttcagatcaccaagtgcattgatgttcatctgaaagaaaatgctgcctactttcagttttttgaagaggcgcagtctactgaagcatacctgaaggggctccaggactccatcaggaagaagtacccctgcgacaagaacatgcccctgcagcacctgctggaacagatcaaggagctggagaaagaacgagagaaaatccttgaatacaagcgtcaggtgcagaacttggtaaacaagtctaagaagattgtacagctgaagcctcgtaacccagactacagaagcaataaacccattattctcagagctctctgtgactacaaacaagatcagaaaatcgtgcataagggggatgagtgtatcctgaaggacaacaacgagcgcagcaagtggtacgtgacgggcccgggaggcgttgacatgcttgttccctctgtggggctgatcatccctcctccgaacccactggccgtggacctctcttgcaagattgagcagtactacgaagccatcttggctctgtggaaccagctctacatcaacatgaagagcctggtgtcctggcactactgcatgattgacatagagaagatcagggccatgacaatcgccaagctgaaaacaatgcggcaggaagattacatgaagacgatagccgaccttgagttacattaccaagagttcatcagaaatagccaaggctcagagatgtttggagatgatgacaagcggaaaatacagtctcagttcaccgatgcccagaagcattaccagaccctggtcattcagctccctggctatccccagcaccagacagtgaccacaactgaaatcactcatcatggaacctgccaagatgtcaaccataataaagtaattgaaaccaacagagaaaatgacaagcaagaaacatggatgctgatggagctgcagaagattcgcaggcagatagagcactgcgagggcaggatgactctcaaaaacctccctctagcagaccaggggtcttctcaccacatcacagtgaaaattaacgagcttaagagtgtgcagaatgattcacaagcaattgctgaggttctcaaccagcttaaagatatgcttgccaacttcagaggttctgaaaagtactgctatttacagaatgaagtatttggactatttcagaaactggaaaatatcaatggtgttacagatggctacttaaatagcttatgcacagtaagggcactgctccaggctattctccaaacagaagacatgttaaaggtttatgaagccaggctcactgaggaggaaactgtctgcctggacctggataaagtggaagcttaccgctgtggactgaagaaaataaaaaatgacttgaacttgaagaagtcgttgttggccactatgaagacagaactacagaaagcccagcagatccactctcagacttcacagcagtatccactttatgatctggacttgggcaagttcggtgaaaaagtcacacagctgacagaccgctggcaaaggatagataaacagatcgactttagattatgggacctggagaaacaaatcaagcaattgaggaattatcgtgataactatcaggctttctgcaagtggctctatgatcgtaaacgccgccaggattccttagaatccatgaaatttggagattccaacacagtcatgcggtttttgaatgagcagaagaacttgcacagtgaaatatctggcaaacgagacaaatcagaggaagtacaaaaaattgctgaactttgcgccaattcaattaaggattatgagctccagctggcctcatacacctcaggactggaaactctgctgaacatacctatcaagaggaccatgattcagtccccttctggggtgattctgcaagaggctgcagatgttcatgctcggtacattgaactacttacaagatctggagactattacaggttcttaagtgagatgctgaagagtttggaagatctgaagctgaaaaataccaagatcgaagttttggaagaggagctcagactggcccgagatgccaactcggaaaactgtaataagaacaaattcctggatcagaacctgcagaaataccaggcagagtgttcccagttcaaagcgaagcttgcgagcctggaggagctgaagagacaggctgagctggatgggaagtcggctaagcaaaatctagacaagtgctacggccaaataaaagaactcaatgagaagatcacccgactgacttatgagattgaagatgaaaagagaagaagaaaatctgtggaagacagatttgaccaacagaagaatgactatgaccaactgcagaaagcaaggcaatgtgaaaaggagaaccttggttggcagaaattagagtctgagaaagccatcaaggagaaggagtacgagattgaaaggttgagggttctactgcaggaagaaggcacccggaagagagaatatgaaaatgagctggcaaaggtaagaaaccactataatgaggagatgagtaatttaaggaacaagtatgaaacagagattaacattacgaagaccaccatcaaggagatatccatgcaaaaagaggatgattccaaaaatcttagaaaccagcttgatagactttcaagggaaaatcgagatctgaaggatgaaattgtcaggctcaatgacagcatcttgcaggccactgagcagcgaaggcgagctgaagaaaacgcccttcagcaaaaggcctgtggctctgagataatgcagaagaagcagcatctggagatagaactgaagcaggtcatgcagcagcgctctgaggacaatgcccggcacaagcagtccctggaggaggctgccaagaccattcaggacaaaaataaggagatcgagagactcaaagctgagtttcaggaggaggccaagcgccgctgggaatatgaaaatgaactgagtaaggtaagaaacaattatgatgaggagatcattagcttaaaaaatcagtttgagaccgagatcaacatcaccaagaccaccatccaccagctcaccatgcagaaggaagaggataccagtggctaccgggctcagatagacaatctcacccgagaaaacaggagcttatctgaagaaataaagaggctgaagaacactctaacccagaccacagagaatctcaggagggtggaagaagacatccaacagcaaaaggccactggctctgaggtgtctcagaggaaacagcagctggaggttgagctgagacaagtcactcagatgcgaacagaggagagcgtaagatataagcaatctcttgatgatgctgccaaaaccatccaggataaaaacaaggagatagaaaggttaaaacaactgatcgacaaagaaacaaatgaccggaaatgcctggaagatgaaaacgcgagattacaaagggtccagtatgacctgcagaaagcaaacagtagtgcgacggagacaataaacaaactgaaggttcaggagcaagaactgacacgcctgaggatcgactatgaaagggtttcccaggagaggactgtgaaggaccaggatatcacgcggttccagaactctctgaaagagctgcagctgcagaagcagaaggtggaagaggagctgaatcggctgaagaggaccgcgtcagaagactcctgcaagaggaagaagctggaggaagagctggaaggcatgaggaggtcgctgaaggagcaagccatcaaaatcaccaacctgacccagcagctggagcaggcatccattgttaagaagaggagtgaggatgacctccggcagcagagggacgtgctggatggccacctgagggaaaagcagaggacccaggaagagctgaggaggctctcttctgaggtcgaggccctgaggcggcagttactccaggaacaggaaagtgtcaaacaagctcacttgaggaatgagcatttccagaaggcgatagaagataaaagcagaagcttaaatgaaagcaaaatagaaattgagaggctgcagtctctcacagagaacctgaccaaggagcacttgatgttagaagaagaactgcggaacctgaggctggagtacgatgacctgaggagaggacgaagcgaagcggacagtgataaaaatgcaaccatcttggaactaaggagccagctgcagatcagcaacaaccggaccctggaactgcaggggctgattaatgatttacagagagagagggaaaatttgagacaggaaattgagaaattccaaaagcaggctttagaggcatctaataggattcaggaatcaaagaatcagtgtactcaggtggtacaggaaagagagagccttctggtgaaaatcaaagtcctggagcaagacaaggcaaggctgcagaggctggaggatgagctgaatcgtgcaaaatcaactctagaggcagaaaccagggtgaaacagcgcctggagtgtgagaaacagcaaattcagaatgacctgaatcagtggaagactcaatattcccgcaaggaggaggctattaggaagatagaatcggaaagagaaaagagtgagagagagaagaacagtcttaggagtgagatcgaaagactccaagcagagatcaagagaattgaagagaggtgcaggcgtaagctggaggattctaccagggagacacagtcacagttagaaacagaacgctcccgatatcagagggagattgataaactcagacagcgcccatatgggtcccatcgagagacccagactgagtgtgagtggaccgttgacacctccaagctggtgtttgatgggctgaggaagaaggtgacagcaatgcagctctatgagtgtcagctgatcgacaaaacaaccttggacaaactattgaaggggaagaagtcagtggaagaagttgcttctgaaatccagccattccttcggggtgcaggatctatcgctggagcatctgcttctcctaaggaaaaatactctttggtagaggccaagagaaagaaattaatcagcccagaatccacagtcatgcttctggaggcccaggcagctacaggtggtataattgatccccatcggaatgagaagctgactgtcgacagtgccatagctcgggacctcattgacttcgatgaccgtcagcagatatatgcagcagaaaaagctatcactggttttgatgatccattttcaggcaagacagtatctgtttcagaagccatcaagaaaaatttgattgatagagaaaccggaatgcgcctgctggaagcccagattgcttcagggggtgtagtagaccctgtgaacagtgtctttttgccaaaagatgtcgccttggcccgggggctgattgatagagatttgtatcgatccctgaatgatccccgagatagtcagaaaaactttgtggatccagtcaccaaaaagaaggtcagttacgtgcagctgaaggaacggtgcagaatcgaaccacatactggtctgctcttgctttcagtacagaagagaagcatgtccttccaaggaatcagacaacctgtgaccgtcactgagctagtagattctggtatattgagaccgtccactgtcaatgaactggaatctggtcagatttcttatgacgaggttggtgagagaattaaggacttcctccagggttcaagctgcatagcaggcatatacaatgagaccacaaaacagaagcttggcatttatgaggccatgaaaattggcttagtccgacctggtactgctctggagttgctggaagcccaagcagctactggctttatagtggatcctgttagcaacttgaggttaccagtggaggaagcctacaagagaggtctggtgggcattgagttcaaagagaagctcctgtctgcagaacgagctgtcactgggtataatgatcctgaaacaggaaacatcatctctttgttccaagccatgaataaggaactcatcgaaaagggccacggtattcgcttattagaagcacagatcgcaaccggggggatcattgacccaaaggagagccatcgtttaccagttgacatagcatataagaggggctatttcaatgaggaactcagtgagattctctcagatccaagtgatgataccaaaggattttttgaccccaacactgaagaaaatcttacctatctgcaactaaaagaaagatgcattaaggatgaggaaacagggctctgtcttctgcctctgaaagaaaagaagaaacaggtgcagacatcacaaaagaataccctcaggaagcgtagagtggtcatagttgacccagaaaccaataaagaaatgtctgttcaggaggcctacaagaagggcctaattgattatgaaaccttcaaagaactgtgtgagcaggaatgtgaatgggaagaaataaccatcacgggatcagatggctccaccagggtggtcctggtagatagaaagacaggcagtcagtatgatattcaagatgctattgacaagggccttgttgacaggaagttctttgatcagtaccgatccggcagcctcagcctcactcaatttgctgacatgatctccttgaaaaatggtgtcggcaccagcagcagcatgggcagtggtgtcagcgatgatgtttttagcagctcccgacatgaatcagtaagtaagatttccaccatatccagcgtcaggaatttaaccataaggagcagctctttttcagacaccctggaagaatcgagccccattgcagccatctttgacacagaaaacctggagaaaatctccattacagaaggtatagagcggggcatcgttgacagcatcacgggtcagaggcttctggaggctcaggcctgcacaggtggcatcatccacccaaccacgggccagaagctgtcacttcaggacgcagtctcccagggtgtgattgaccaagacatggccaccagcgtgaagcctgctcagaaagccttcataggcttcgagggtgtgaagggaaagaagaagatgtcagcagcagaggcagtgaaagaaaaatggctcccgtatgaggctggccagcgcttcctggagttccagtacctcacgggaggtcttgttgacccggaagtgcatgggaggataagcaccgaagaagccatccggaaggggttcatagatggccgcgccgcacagaggctgcaagacaccagcagctatgccaaaatcctgacctgccccaaaaccaaattaaaaatatcctataaggatgccataaatcgctccatggtagaagatatcactgggctgcgccttctggaagccgcctccgtgtcgtccaagggcttacccagcccttacaacatgtcttcggctccggggtcccgctccggctcccgctcgggatctcgctccggatctcgctccgggtcccgcagtgggtcccggagaggaagctttgacgccacagggaattcttcctactcttattcctactcatttagcagtagttctattgggcactag

SEQ ID NO: 164 - protein, 2871 aa, Homo sapiens
MSCNGGSHPRINTLGRMIRAESGPDLRYEVTSGGGGTSRMYYSRRGVITDQNSDGYCQTGTMSRHQNQNTIQELLQNCSDCLMRAELIVQPELKYGDGIQLTRSRELDECFAQANDQMEILDSLIREMRQMGQPCDAYQKRLLQLQEQMRALYKAISVPRVRRASSKGGGGYTCQSGSGWDEFTKHVTSECLGWMRQQRAEMDMVAWGVDLASVEQHINSHRGIHNSIGDYRWQLDKIKADLREKSAIYQLEEEYENLLKASFERMDHLRQLQNIIQATSREIMWINDCEEEELLYDWSDKNTNIAQKQEAFSIRMSQLEVKEKELNKLKQESDQLVLNQHPASDKIEAYMDTLQTQWSWILQITKCIDVHLKENAAYFQFFEEAQSTEAYLKGLQDSIRKKYPCDKNMPLQHLLEQIKELEKEREKILEYKRQVQNLVNKSKKIVQLKPRNPDYRSNKPIILRALCDYKQDQKIVHKGDECILKDNNERSKWYVTGPGGVDMLVPSVGLIIPPPNPLAVDLSCKIEQYYEAILALWNQLYINMKSLVSWHYCMIDIEKIRAMTIAKLKTMRQEDYMKTIADLELHYQEFIRNSQGSEMFGDDDKRKIQSQFTDAQKHYQTLVIQLPGYPQHQTVTTTEITHHGTCQDVNHNKVIETNRENDKQETWMLMELQKIRRQIEHCEGRMTLKNLPLADQGSSHHITVKINELKSVQNDSQAIAEVLNQLKDMLANFRGSEKYCYLQNEVFGLFQKLENINGVTDGYLNSLCTVRALLQAILQTEDMLKVYEARLTEEETVCLDLDKVEAYRCGLKKIKNDLNLKKSLLATMKTELQKAQQIHSQTSQQYPLYDLDLGKFGEKVTQLTDRWQRIDKQIDFRLWDLEKQIKQLRNYRDNYQAFCKWLYDRKRRQDSLESMKFGDSNTVMRFLNEQKNLHSEISGKRDKSEEVQKIAELCANSIKDYELQLASYTSGLETLLNIPIKRTMIQSPSGVILQEAADVHARYIELLTRSGDYYRFLSEMLKSLEDLKLKNTKIEVLEEELRLARDANSENCNKNKFLDQNLQKYQAECSQFKAKLASLEELKRQAELDGKSAKQNLDKCYGQIKELNEKITRLTYEIEDEKRRRKSVEDRFDQQKNDYDQLQKARQCEKENLGWQKLESEKAIKEKEYEIERLRVLLQEEGTRKREYENELAKVRNHYNEEMSNLRNKYETEINITKTTIKEISMQKEDDSKNLRNQLDRLSRENRDLKDEIVRLNDSILQATEQRRRAEENALQQKACGSEIMQKKQHLEIELKQVMQQRSEDNARHKQSLEEAAKTIQDKNKEIERLKAEFQEEAKRRWEYENELSKVRNNYDEEIISLKNQFETEINITKTTIHQLTMQKEEDTSGYRAQIDNLTRENRSLSEEIKRLKNTLTQTTENLRRVEEDIQQQKATGSEVSQRKQQLEVELRQVTQMRTEESVRYKQSLDDAAKTIQDKNKEIERLKQLIDKETNDRKCLEDENARLQRVQYDLQKANSSATETINKLKVQEQELTRLRIDYERVSQERTVKDQDITRFQNSLKELQLQKQKVEEELNRLKRTASEDSCKRKKLEEELEGMRRSLKEQAIKITNLTQQLEQASIVKKRSEDDLRQQRDVLDGHLREKQRTQEELRRLSSEVEALRRQLLQEQESVKQAHLRNEHFQKAIEDKSRSLNESKIEIERLQSLTENLTKEHLMLEEELRNLRLEYDDLRRGRSEADSDKNATILELRSQLQISNNRTLELQGLINDLQRERENLRQEIEKFQKQALEASNRIQESKNQCTQVVQERESLLVKIKVLEQDKARLQRLEDELNRAKSTLEAETRVKQRLECEKQQIQNDLNQWKTQYSRKEEAIRKIESEREKSEREKNSLRSEIERLQAEIKRIEERCRRKLEDSTRETQSQLETERSRYQREIDKLRQRPYGSHRETQTECEWTVDTSKLVFDGLRKKVTAMQLYECQLIDKTTLDKLLKGKKSVEEVASEIQPFLRGAGSIAGASASPKEKYSLVEAKRKKLISPESTVMLLEAQAATGGIIDPHRNEKLTVDSAIARDLIDFDDRQQIYAAEKAITGFDDPFSGKTVSVSEAIKKNLIDRETGMRLLEAQIASGGVVDPVNSVFLPKDVALARGLIDRDLYRSLNDPRDSQKNFVDPVTKKKVSYVQLKERCRIEPHTGLLLLSVQKRSMSFQGIRQPVTVTELVDSGILRPSTVNELESGQISYDEVGERIKDFLQGSSCIAGIYNETTKQKLGIYEAMKIGLVRPGTALELLEAQAATGFIVDPVSNLRLPVEEAYKRGLVGIEFKEKLLSAERAVTGYNDPETGNIISLFQAMNKELIEKGHGIRLLEAQIATGGIIDPKESHRLPVDIAYKRGYFNEELSEILSDPSDDTKGFFDPNTEENLTYLQLKERCIKDEETGLCLLPLKEKKKQVQTSQKNTLRKRRVVIVDPETNKEMSVQEAYKKGLIDYETFKELCEQECEWEEITITGSDGSTRVVLVDRKTGSQYDIQDAIDKGLVDRKFFDQYRSGSLSLTQFADMISLKNGVGTSSSMGSGVSDDVFSSSRHESVSKISTISSVRNLTIRSSSFSDTLEESSPIAAIFDTENLEKISITEGIERGIVDSITGQRLLEAQACTGGIIHPTTGQKLSLQDAVSQGVIDQDMATSVKPAQKAFIGFEGVKGKKKMSAAEAVKEKWLPYEAGQRFLEFQYLTGGLVDPEVHGRISTEEAIRKGFIDGRAAQRLQDTSSYAKILTCPKTKLKISYKDAINRSMVEDITGLRLLEAASVSSKGLPSPYNMSSAPGSRSGSRSGSRSGSRSGSRSGSRRGSFDATGNSSYSYSYSFSSSSIGH

SEQ ID NO: 165 - DNA, 948 bp, Homo sapiens; identical to SEQ ID NO: 159
  CDS (1)..(945)

SEQ ID NO: 166 - protein, 315 aa, Homo sapiens; identical to SEQ ID NO: 160

SEQ ID NO: 167 - DNA, 2232 bp, Homo sapiens
  CDS (1)..(2232)
atgagaggatcgcatcaccatcaccatcacggatccgcatgcgagctcggtaccatgaaccactcgccgctcaagaccgccttggcgtacgaatgcttccaggaccaggacaactccacgttggctttgccgtcggaccaaaagatgaaaacaggcacgtctggcaggcagcgcgtgcaggagcaggtgatgatgaccgtcaagcggcagaagtccaagtcttcccagtcgtccaccctgagccactccaatcgaggttccatgtatgatggcttggctgacaattacaactatgggaccaccagcaggagcagctactactccaagttccaggcagggaatggctcatggggatatccgatctacaatggaaccctcaagcgggagcctgacaacaggcgcttcagctcctacagccagatggagaactggagccggcactacccccggggcagctgtaacaccaccggcgcaggcagcgacatctgcttcatgcagaaaatcaaggcgagccgcagtgagcccgacctctactgtgacccacggggcaccctgcgcaagggcacgctgggcagcaagggccagaagaccacccagaaccgctacagcttttacagcacctgcagtggtcagaaggccataaagaagtgccctgtgcgcccgccctcttgtgcctccaagcaggaccctgtgtatatcccgcccatctcctgcaacaaggacctgtcctttggccactctagggccagctccaagatctgcagtgaggacatcgagtgcagtgggctgaccatccccaaggctgtgcagtacctgagctcccaggatgagaagtaccaggccattggggcctattacatccagcatacctgcttccaggatgaatctgccaagcaacaggtctatcagctgggaggcatctgcaagctggtggacctcctccgcagccccaaccagaacgtccagcaggccgcggcaggggccctgcgcaacctggtgttcaggagcaccaccaacaagctggagacccggaggcagaatgggatccgcgaggcagtcagcctcctgaggagaaccgggaacgccgagatccagaagcagctgactgggctgctctggaacctgtcttccactgacgagctgaaggaggaactcattgccgacgccctgcctgttctggccgaccgcgtcatcattcccttctctggctggtgcgatggcaatagcaacatgtcccgggaagtggtggaccctgaggtcttcttcaatgccacaggctgcttgaggaacctgagctcggccgatgcaggccgccagaccatgcgtaactactcagggctcattgattccctcatggcctatgtccagaactgtgtagcggccagccgctgtgacgacaagtctgtggaaaactgcatgtgtgttctgcacaacctctcctaccgcctggacgccgaggtgcccacccgctaccgccagctggagtataacgcccgcaacgcctacaccgagaagtcctccactggctgcttcagcaacaagagcgacaagatgatgaacaacaactatgactgccccctgcctgaggaagagaccaaccccaagggcagcggctggttgtaccattcagatgccatccgcacctacctgaacctcatgggcaagagcaagaaagatgctaccctggaggcctgtgctggtgccctgcagaacctgacagccagcaaggggctgatgtccagtggcatgagccagttgattgggctgaaggaaaagggcctgccacaaattgcccgcctcctgcaatctggcaactctgatgtggtgcggtccggagcctccctcctgagcaacatgtcccgccaccctctgctgcacagagtgatggggaaccaggtgttcccggaggtgaccaggctcctcaccagccacactggcaataccagcaactccgaagacatcttgtcctcggcctgctacactgtgaggaacctgatggcctcgcagccacaactggccaagcagtacttctccagcagcatgctcaacaacatcatcaacctgtgccgaagcagtgcctcacccaaggccgcagaagctgcccggcttctcctgtctgacatgtggtccagcaaggaactgcagggtgtcctcagacagcaaggtttcgataggaacatgctgggaaccttagctggggccaacagcctcaggaacttcacctcccgattc

SEQ ID NO: 168 - protein, 744 aa, Homo sapiens
MRGSHHHHHHGSACELGTMNHSPLKTALAYECFQDQDNSTLALPSDQKMKTGTSGRQRVQEQVMMTVKRQKSKSSQSSTLSHSNRGSMYDGLADNYNYGTTSRSSYYSKFQAGNGSWGYPIYNGTLKREPDNRRFSSYSQMENWSRHYPRGSCNTTGAGSDICFMQKIKASRSEPDLYCDPRGTLRKGTLGSKGQKTTQNRYSFYSTCSGQKAIKKCPVRPPSCASKQDPVYIPPISCNKDLSFGHSRASSKICSEDIECSGLTIPKAVQYLSSQDEKYQAIGAYYIQHTCFQDESAKQQVYQLGGICKLVDLLRSPNQNVQQAAAGALRNLVFRSTTNKLETRRQNGIREAVSLLRRTGNAEIQKQLTGLLWNLSSTDELKEELIADALPVLADRVIIPFSGWCDGNSNMSREVVDPEVFFNATGCLRNLSSADAGRQTMRNYSGLIDSLMAYVQNCVAASRCDDKSVENCMCVLHNLSYRLDAEVPTRYRQLEYNARNAYTEKSSTGCFSNKSDKMMNNNYDCPLPEEETNPKGSGWLYHSDAIRTYLNLMGKSKKDATLEACAGALQNLTASKGLMSSGMSQLIGLKEKGLPQIARLLQSGNSDVVRSGASLLSNMSRHPLLHRVMGNQVFPEVTRLLTSHTGNTSNSEDILSSACYTVRNLMASQPQLAKQYFSSSMLNNIINLCRSSASPKAAEAARLLLSDMWSSKELQGVLRQQGFDRNMLGTLAGANSLRNFTSRF

SEQ ID NO: 169 - DNA, 846 bp, Homo sapiens
  CDS (1)..(846)
atgaaccactcgccgctcaagaccgccttggcgtacgaatgcttccaggaccaggacaactccacgttggctttgccgtcggaccaaaagatgaaaacaggcacgtctggcaggcagcgcgtgcaggagcaggtgatgatgaccgtcaagcggcagaagtccaagtcttcccagtcgtccaccctgagccactccaatcgaggttccatgtatgatggcttggctgacaattacaactatgggaccaccagcaggagcagctactactccaagttccaggcagggaatggctcatggggatatccgatctacaatggaaccctcaagcgggagcctgacaacaggcgcttcagctcctacagccagatggagaactggagccggcactacccccggggcagctgtaacaccaccggcgcaggcagcgacatctgcttcatgcagaaaatcaaggcgagccgcagtgagcccgacctctactgtgacccacggggcaccctgcgcaagggcacgctgggcagcaagggccagaagaccacccagaaccgctacagcttttacagcacctgcagtggtcagaaggccataaagaagtgccctgtgcgcccgccctcttgtgcctccaagcaggaccctgtgtatatcccgcccatctcctgcaacaaggacctgtcctttggccactctagggccagctccaagatctgcagtgaggacatcgagtgcagtgggctgaccatccccaaggctgtgcagtacctgagctcccaggatgagaagtaccaggccattggggcctattacatccagcataccggatccagatctcatcaccatcaccatcac

SEQ ID NO: 170 - protein, 282 aa, Homo sapiens
MNHSPLKTALAYECFQDQDNSTLALPSDQKMKTGTSGRQRVQEQVMMTVKRQKSKSSQSSTLSHSNRGSMYDGLADNYNYGTTSRSSYYSKFQAGNGSWGYPIYNGTLKREPDNRRFSSYSQMENWSRHYPRGSCNTTGAGSDICFMQKIKASRSEPDLYCDPRGTLRKGTLGSKGQKTTQNRYSFYSTCSGQKAIKKCPVRPPSCASKQDPVYIPPISCNKDLSFGHSRASSKICSEDIECSGLTIPKAVQYLSSQDEKYQAIGAYYIQHTGSRSHHHHHH

SEQ ID NO: 171 - DNA, 30 bp, Artificial Sequence
  Description of Artificial Sequence: Primer
atgaaccactcgccgctcaagaccgccttg

SEQ ID NO: 172 - DNA, 30 bp, Artificial Sequence
  Description of Artificial Sequence: Primer
cgttcccggttctcctcaggaggctgactg

SEQ ID NO: 173 - DNA, 30 bp, Artificial Sequence
  Description of Artificial Sequence: Primer
ttagaatcgggaggtgaagttcctgaggct

SEQ ID NO: 174 - DNA, 27 bp, Artificial Sequence
  Description of Artificial Sequence: Primer
caccaccaacaagctggagacccggag

SEQ ID NO: 175 - DNA, 39 bp, Artificial Sequence
  Description of Artificial Sequence: Primer
ctcggtaccaaccactcgccgctcaagaccgccttggcg

SEQ ID NO: 176 - DNA, 39 bp, Artificial Sequence
  Description of Artificial Sequence: Primer
attaagcttttagaatcgggaggtgaagttcctgaggct
